United States Patent Application Publication US 2026/0191916 A1 - sequence listing, part 6

SEQ ID NO: 10 - DNA, 4346138 bp, Blautia caecimuris (residues 1-2,173,069 of 4,346,138)
  source 1..4346138: mol_type = genomic DNA
atggattatgaatacttccgggtagaagaatccgagcagttttcatttttccgtattcccaaggcactgttcacagaaaaggaatttgaagggctgtccacggatgcgaagcttctgtatggcatcctgctggacaggatcaacctttcaaagaaaaatggctgggtggatgctgatggttatgtgtatattatctacacggtagctgaacttcaggaagtgctgcatatgtcacacacaacggttacaaagcttctccgggagcttgacagtgtacatggcattggtctgatcgaacggtaccggcagggctgcaaccgtccatcggtgatatatgtgaagaatttcgtgaaacgcatccgggcaaaaccggcagtttattatccttctggaacgcaagaaatttgctgtccggaacgcaagaatctggcagtccggaatgcaaaaaacttgcagtccggaacgcaaaaaaatggaagtccggagtgcaagaattttgccacaagtaatactgatataaataagactgataagaatgatactgacaggagtaagagccgctcttctgaaaaggaaagcgcctgtctgtatggacggtttggaaatgtcgggctttcggtagaagaataccgggagctacggaaactgtatccgtatgactgccagaggatgattgaccagctttctgcttatatgaaatcaactgggaaaatctatcaggatcatttcgcaacgcttcttctctgggcaggaagggaagaactgaaaaccggttctggaagatatgacttcgaggaaggagagagtctatgacagatagcaggaatgtggctgattttcttggggaagacggatgcctccggtgtggtgtatgcggaaaacgaaaacagctgaggatcaattttatgggaagggatcgtgtagtgggctgcctgtgtgactgcgaggttcaggcaagaaaagaaaaagaagagcagctccgcagggaggaagcccagagggagctttaccagagaaaatcggtgggacttagagaccggaggttctgggaatggcggtttgaaaatgataatgggtcgaatgataagatgctcattgccaggcagtatgcaaaaaactgggagaagatgaaaaaagaaaatgtagggcttctcctgatgggtccggtggggactgggaagagtttttttgccgggtgtattgccaatgcccttctggaacagggggagcgggtgatgatgacgaacttctcccgtatcctgaatgaaatgacaaactatcaggcagataaaaaccagatcgtgcagaatctggtggattacccgcttttgatcattgatgatctggggatagaacgcaattcagagtttgccctggagcagatctataacgtgattgacagcaggtactgtaaaatgaagcctctcatcatcacaacaaatctcgggttgaatgatatgaaagatgaatcgcttgatgtagcccataagcgaatttacagcagaatattggagatgtgtgtgcctgtctattgcggcggggcagataagcgaagagaagaaggaacggaaaagctcggtcggatgcagagtctgatcagtggctgatcggttccttctttgatgaaaggggtgataccgatggtcttaggttgggacagcacgtaatacgctgaaaggaggaaaattcatgcaggaagaagtaacacagaaaacggtgactttttgtgtgcgtaccacaaaaatgacggcagatgtgctgaaaaaagtgattgccgcatacctgcggcatcagaaacagaaaagtgctgagaagaaaacacagaaaaatcagccgaaacaggggaaaatcacggtgaaggagctggcaaagcagaatgccgggatgacgaacattgagatcacacccaagaacatcaagtcttttgaacggtatgccagaaaatacgggatcaattatgccctgaaaaaggataagaccaaagatccgccggtttatctggtgttctttaagggacgtgaccaggatgcgatcaccgctgcttttcgtgaattttcccagaaagagatccaaaaggcgaaccgtccttccatccacaaacgtctggcagcatacaggagtatcgttgcagggaagacgaagggcaaagccaagaataagcatcaggaggtatcccggtgagaaaactaaatgccgggggattgaccaacaagctgaaagcaaaagccagagttacgctgtccgctttggatatgaaaaagcttattctgaccaatcttccgtacctgttcatctttttgtttgcagacagggcatcctgtttgtaccgggcaagccccggagcagatatgggaaacaaactattatatgccatggaacacgctgaccggattttgaccgggtttctgccaagtctttactacatggatgttctggtgggagccgggattgctgcagttgtgaagatactggtctggcagaaacaggcagatgcaaaaaagctccgcaaaggcgtggagtatggttccgccaggtggggaacagcggaagacattaaaccatttatggcagatgatttctggatgaacattccgctgactgcaacggaatccattaccatggaaagccgtccgaagaaccccaagtttgccagaaataaaaacatctgcgtcatcggcggttccggcagtggaaaaacaaggtttttcgtaaaggtctctattatgatgatgaactgttccatggtcatcacagacccgaagggaacactgatcgaagaatgcgggaagatgctagccaaaggaccgcccaaaagagacaagcatggaaatgttgtgaaagataaatccgggaaggtggtgcatgagccttatgtaatcaaggtcttaaataccattaacttctccaaatcgctccactacaatcgtgcgacttgttcgccgctgaaaaggtggcgcacagcgctgtttcaatcagttctgtgaactgataattcgagaggtggaatgaaggagtaacgccctgaaacgcctcccctgatactccggcatgcagaggccaaactctgtgtgaagcccggtaaagccggcagagagatgccgtaacaggttaagctgacgaaagctgtccagaggtggacggtgcatcctatatgccgggggtctataagatacccatggtgagaatgacagagatgtctgacgaaactcccgaatgtaaaggtctaaaagtgccacgctcagaaatgggcgtgtgggttaaagcccaggcagtacggtttagtagaaatggttgttacgaaacaccgtggcacgttataggcgtgtccaagctgtcaggcccagagggaacacctaaaggtatgtatgtacagataggattatcggaacaaggaaaggcaggaagtctactggataatccggcgaagaataataagcggatgaattcctgctgaaaagcagtggtcgaaccgatgatatcgtctgcgaaaaagaggacggttaggaatggccacaagtcaggcaaaacgtcagcagtacacaaccactattcatgcagtcgagtaagaaaaagaaattgtcgctcggtttcatagaaatggggtgatgtacatggcacaaaaagctaagaagaaaagcaagctacgccatgcggaatactatgacatgcagaaaacctttgacagtctgtatgcagacagcaaaagcggtgaagtctttgggcatctgatggatatcatcagcgcccccaacaacatcaagctggcatttagaaatatcaaaggcaatgatggcagtcataccgcaggcacggatgggcggacaatagaatcattggcagtcatgtcagaggataagtttgtaaagctcatccagaaacagttcaggaggtatgaaccaaaagcagtaaaaagagtagaaataccaaagccaaacggaaagatgaggcctctgggaataccgtgtattattgaccgaatagtacagcaatgtattttgcaggtcatggagccaatctgtgaagcaaagttctatgagcactcttatgggttcagaccgtgtcggagcgcagaaaatgcgatttcctatgcgtatggactcgcccaaaggaacaagcttcactatgtagtcgatgtggatgttaaaggattcttcgataacgtcgaccacagaaagctgctgaaacagatctggactttaggtatacgggacaccaagttgattcagatcatcaaggccatgctgaaagcgccaatcgaaatgcctgatggggaaaccgtcctcccatccaagggaacgccgcaaggtggtatcctttcaccattgctggcaaacattgtcctcaatgaactggactggtggattgcctctcagtgggatgaaatggtgaggcacatgaaacatccgtgtaaagtgacctactatcccaacggcgcagagaaaaagtgcaacagctatacagccttgaagaaaagcaacctcaaggagatgcggattgtccgttatgcggatgatttcaagatattttgcagaaccaaagaggatgcagagaaaacctattatgcagtcaaagactggctatggaaacggctaaaactggaagtgtctgatgaaaagtcaaaagtgactaatctcagaaagcgtgatagtgagtttctgggttttcgcataaaactgcggcgcaaaagtaactcatgggtgataacttcaaatgtctgcgataaagccatacacagaatcggcaaggaaatggctgacagtgtcaaggcaatacaaagcagtaagacggctgaagaaataagcctgaatgtggggaactataatgccaaggttatcggagtgcaggactattactgcattgcgacaagggtcaacttgaatttcagcgatatcgcccgtccaatcaatggacagcttctccatcgtattgacggaatcaagaagcagggcgagatcaaaaacagatatctgaggaaacgatacggaaaatcgaagcaaatgcgatggattggagaaacgccactggttccattagcttacgtgcaattcaagattccaatgaggaaaagccgaaaaatcaatccgtatacgcccgaaggtagagcagagatacacgataatctcaggattgacgtaaattcaatgctctggctgatgaggcatccgataccgaccgaatcagtgagatacaacgacaaccgggtctccctctatgcagggcaagacggtaaatgtgcaatcaccgggaagaaactggatgttcaaacctgtatctgttacaggaaaacaaacaattgtaagaagggcaatgacagctaccagaacctgttgcttctttctttgcagggattggcaatagtcagctcggaagacatgatgtctgtagtggcgttggtgaaggaatactctctgaatgccaaggttattaccaaagtgaacaaactgcgtgctaccgcaggactgccgctactggcggcaaagtagcaaacttagccaatgtgaaagagtgattgtgtatcactgctgaaactatgcttgatggaacgccggatgcggtgaaagtcgcatgtccggtgtgaagtgggggaaaacccggagataatttcaaagggttacctatcactatcatttgcctacttaaaatccgaaaaggatatcctgaaactggtgacggttattattgccaacaccaagggagaaggggaaaaggcaaccgaggatttctgggtcaaagcagaaaaactgctgtatacggcactgattgccctgatctggtatgaaggggacgaggacgagaagaacatgaataccctgatcgaccttctgaatgaaagtgagaccagggaggatgacgagaattacaaaaatccagtggatatgctgtttgaggatctggaaaaaaggaatccggaacactttgcggtacgccagtataagaaatacaagctggcggcaggtaagacagcaaaatccatcctgatcagctgtggagccagactggctccatttgatattgccgagcttcgggagatcatgagctatgatgagatggaactggataaggtgggagaccggaagacggcactgtttctgattatgtcagatacagataccacctttaactttgtgattgccatgctgcagtcccagcttttcaacctgctttgtgataaggcagatgataaatatggcggtaggctgccggtccatgtgcgggtcatctgcgatgagtttgccaacatcgggcagattccacagtttgataagttgattgccaccatccgaagcagggaaatctctgcttctattattttgcagtcacagagccagctgaaggcaatgtataaggatagtgcggacacaattctggggaattgtgacacgatgctgttccttggaggtaaggaaaagaccacgctgaaagagatgagtgagcttctggggaaggagacgattgacctttacaacacctcggaaacacgcagcaaccagaagtcattcgggctgaattaccagaaaactgggaaacagctgatgacggaggatgagatcgcagtcatggacggcgggaaatgcatcctgcagatccgtggtgtccgtccgttctattcggacaaatacgatataaccaaacacccgaattaccggatccttgcagattacagcgagaagaaccggtttcaggtggaaaaggaactggatccgaagtacacaccgaaacctgatgatgaggtggaagtgatggaaatggatctttcaggagacgggaatgagcaggaaaataatgaggaaaggaataactaacagggtgcgccggtattgttaccggcgtttttcattcccggttacacccggcaaagttagttttggtgatttatatggcattttttaccagtgcaattactactcttaagaccctggtcgtagcaatcggggcgggtcttggcgtatggggtgtcatcaaccttctcgaaggttatggcaatgacaaccctggcgcaaagagccagggaatcaaacagctcatggcaggagcaggaatcatgctgctgggaactaccctgattccccagctggcaacactgttcggttaatggggtaatggatgaacaccattatcgaacgaatcacggaagccatcaaggagatcctcattgggatgatccagaatggtctggaagggatgtttgtggaggtcaatgataaggtgggaacgattgccagtcaggtcgggcagaccccgcagggatggaacgcaggggtttttaacctcatccagaacctgtcccagacggtgatcgtgcccatcgccggtctgatcatcacgtttgtactttgttatgagctgatcacgatggtcacacagaagaataacttccatgagtttgaaacctacaacattttcctctggatctttaaggcatatgtggcgatttaccttgtgacgaacacattcaatatcacgatggcggtatttgatgtggggcagcacatcgtaaatggtgcagccggtgtgatctccggaagtacggcggtggatgcttctgccgccattgctaccctgacggaatctctggaagatatggaaatcggggaactgtttttactggcaatggaaacacttcttatcagccttaccatgagcatcctctccgtgattatcacggtgatcatgtatggcaggatgattgagatctacctttatacttccgtggcaccgatcccgtttgccaccataaccaataaggaatggggcaatatcgggaacaactatctgaaaggcttgttcgccctggcatttcagggattcttcatgctggtctgtgtcggtatttattccgtactggtcaatgcgatgaccatatccacgaacctgcatggggcaatgttttcagtggcggcatatacggtcgtactggcattttcactgtttaagaccggaagcctcagtaaatcaatattcaatgcccactgatgggcaggaaaagaaaggagtactacctatggcgtatgtaccagtacccaaagaccttacaaaggtcaagacaaaagtagcattgaacctgacaaagcggcagctgatctttttttcacttgccgcagtagtgggagtcccgttatacctgctggcaaagaaaccccttggttccagtgtgtcagcgatccttatggtaactgtcatgctgccatttttctttatggcaatgtatgaaaaagacggtctcccttttgaaaaagtgatgggaaatatcatccgccagaaattcctctgtccggcgaaacgtccgtacaagacggagaacttctatcaggcggtggattccctcgtaaagaaggagggcgtgccggatggcaaaaaagaagaaacaggcacagcagcagtgcctggaagcggcggcaagaaaaaaccgtcaggaaagaagaaaaagaaacgacaaaaaggaaagggaaaaggaaaagcttaggaagagacaggagaaggaaaggaaacggcagaagaacatcccccatactgcccagcagagtatcccgtaccagcggatgtttgcggatggcatctgccaggtatcgaagaactttttttccaaaaccgtacagttttacgatatcaattaccagcttgccctgaatgaggataagaccacaatctttgaaaattactgtgatttcctgaattactttgactcttccatcagtgtgcagctgtcttttatcaaccagcaggtggatgtggcagagtttgaaaagagcattgatattccggaccagaacgatgatttcaacgagatccgggaagaataccggacgatgttaaagaaccagctgtccaaagggaataatggtttggtgaaaacgaaatatatcacgttcgggattgaagcggagagcttaaaggtggcaagaccgaggcttgagcggattgaggcagatatcctcaacaactttaaagtccttggggcacaggctcatccactgaacggggtggagcgtcttgagatcatgtaccatgtgttcaaccaggataggatcgagccgttccggttcaattataagatgcttccacagacggggcttaagacaaaggattttatcgcaccgacatcctttaacttctcaaagaattcttcatttatgatgggaaagacactgggaagcgtcagctacctgcagatcctcgcaccggaactgaccgaccgtatgctggcggattttctggatgtggatgagagcatcaatgtgaatatccatatccagtccattgaccagacctctgctatcaagatgatcaagagtaaaatctctgacctggacaagatgaagattgaggagcagaagcgggcagtacgctccggttatgacatggatgtgctgccgtccgaccttgtgacttatggggaagaagcgaaaaaccttctggaagacctccagtccaggaatgagaggatgttccttgtcactgtccttgtgatgaacacggcaaagaaacgtcagaaactggataacaacattttccaggtgcagggcatcgcacagaagtataactgttccctgcgtcctttggattaccagcaggaagcggggctgatgtcctgtatcccactgggagtaaacagaatcgagatccagcgtgggcttaccacctcggcaacagcaatctttgtgccattcacgacacaggaactgttccaggaaggggaagccctttattatggtctgaatgcgttgtccaacaacatgatcatggtggaccggaagcggctaaaaaatcccaacgggctaatcttgggtaccccgggttccggtaaatccttctctgcaaaaagggagattaccaactgcttcctcattacggaggatgacattatcatctgcgacccggaagcagagtattacccactggtgcaggcactgcatgggcaggtagtccgtatctcaccggtatcgacccagtatatcaacccgatggatttaaacctcaactattccgaggaggataatccgctttcactgaaatcagattttattttatcgctttgtgagctgatcgtgggaggaaagaacggtctggaaccggtggaaaagaccatcattgaccggtgtgtgcgtcttgtgtatcaggaatatctttccgacccggtgccggagaagatgccaatccttcaggatctgtatgacctgctccgtgggcaggatgaaccggaggcacagcggctggcaaccgcactggaaatttacgttaccggttcattgaatgtgttcaaccaccggacaaacgtggatatcaataaccggatcgtctgctttgacattaaggagctgggaaaacagctgaaaaagatcgggatgctcatcgtccaggaccaggtatggaacagggtaacggtcaaccgttccgcccataaatccacccggtactatgttgatgagttccatctgcttttgaaggaagagcagacggcagcctacagtgttgagatctggaagaggttccgtaaatggggaggtatcccgaccggtatcacccagaatatcaaagatcttctggcaagccgtgagattgagaacatttttgaaaattcagatttcatttatatgctcaaccaggcatccggtgaccggcagatcctggcaaagcagctgaacatttcaccgacccagctgtcctatgtgacgaacagcaatgaaggtgaggggcttttgttctatggaaatgtcatcatcccgtttgtggacaggttcccgaagaacaggctgtatcagttattaacgacccgcccggaagaaacgggaaatcaggcataggaggtaacagatggcagaacagagaatgaaagtcagggagaaaaccgtccagaagatgacaaaggatggtctggtggaagaaaacctggcagataaatccactgttcgtgtcagcagctgtacccgggatgtgcagatgtcaaaaaaggatatcggaaaagggctggatctttccaaccgaagaggggcgaaagaggacagtacggatcaggccaggcattctgtacagaattccagggatgcaccggcaaaggcacagacagtagataaggcaaaagcccggaaaatgatccgggaacaggcagagggcagtgccggttccaaactgtcattggaagagaagaaaaacggcagtgggaaacttcaggagaagcatacagatcttgcccagtcaaggggagatgcgagaaagaaacagaccggaggcagtaaaaagccggggcagaagcagaggctgaagtttgcttatgaggagacggcggaggcagtcagggatggcgattcttccgccaaactgaaccggatggatgcggacggggtaaatttccgccatgatgcccagaagaagcggaatcagaagcttgcccacacggaggcagaaaagaaaaacgcaccaaagaagcattccatgaaagaaaaggtctatcaggaaaatgcagaaaatgcgggagcgaaaaagaaaatccggctgaaatttgaaggggaaagctcaaaagatgcttcccttgttaaaaaggcaggcaccgctgtggcagtatctgtccaccgccaggtcagaaaaaatgatgatggcaatgctgcggtggaaggtgcaaacagtttagctgaaggttcagaggggctttaccatctggaatggcaaagtgccagaaggcggaaccggagaaaaaaccgggcgagtgcttatcaggcaaagaaaacagcgcaggctgcggcagaatcttccgtaaatcaggaacggtcttatttgaagaagctgatccagaaacaacggatcaaaaaagaatatgccaaagcaaaacagagtgagcaggcaatggggactgcagcggtcggcacgattgactatatcaagaagatcggcggcaaagttaccaactttttcaaggaacaccggaaggtttatatcagcatcgcagccctgatcgggatgatgttcctcatcatgaccagcgtaacgtcctgttcctcggcatttatgcagagcctgatcaattataccggaaccagctatatctcttcggatgaggcgatccggcaggcagacctttactacacacagctggaagcaaacttgcaggagagaatcaaccagatggaagcggaagagccggggcatgacgaataccggtacaatatcggaccgattgagcatgacccgtttgttttaatcagctacctgtctgccaaatatgaagagtttacctttgaacaggttaagccggagctggacaggctgtttgcactccagtatcagctggagacagaagctgtaaacgagacggtgacagagacaacgacagtgcgggtaggggaatcccttggaaatgttgtgacgagcggttactgcaactgcccgatctgctgtggcatctggtcaggaggaccgacggcatccggggtgtacccgacagcgaaccatacccttgcggtagatgcgtccaacccgtttgttccaatggggacaaaagtggtcatgaatggtgtggaatacacggtagaagacaccggggcatttgcccgttacggtgtccagtttgatgtgtattatgacagccactcggcggcatacgcacatgggcaccagacctgggaatgcttccttgcggattcgaatggaagccgggaagtggaagtgacaaggacaagggatgtggatgtgctgaacgtgaccttaaattccagcagcctgacgggcatctgccagagccgtctggggattttccagagggaactgttttcagcctacaatgaaacaaaaggcaacctgcagatgttcgggacaccatttgacttcaactggtattacaacgtgagcagctattatggataccggatccatccaatctccggtgcaaaccagctccacaatggagtggatatcggagtgccggaaggtacggaagtactggcagggctgaccggtacggtaacaacctctgcgtataatgacagctatggcaattatgtggtgatcaaagacagtaaaggctatgaactgcggtatgcacatctgaaaagcagaagcgtttcttacggggctgccattactaaaggggatgtgatagggcttgcaggaaataccggcaattccacaggaagccatctccacatggaacttctaaaaaacggggagcggatgaaccccatcttttatctggaaacaggagaagggacgatctttggtggaaatgaatacaccagtgaagcagcacagaggcttctgcaggaagcagccagatatctgggaaccccgtatgtatggggcggatattcgccgagcgggtttgactgttccggatttgtaagttactgcctgaccaattcaggggtaaggaataccggaaggctgaccgcccaggggctttatgatatctgtacaccggtatcagagtccgatgtacagccgggagatttgatcttctttaccggaacctatgatgcaggtgtgccggtaacgcatatcggtatctatgtaggcggtgggcagatgatccactgcgggcatccggtacagtacacatccatttattcatcctactggcagagccatttttatggatttggaagatggtaaaaaagggcggtggtcatgccgcccggaaaggagcagtatgaagagccttgaaaaagcagttgccgattatgaaaaggcaaaggaaaaaatggaggcatccagggcacggtatgaggcagacctgaagcggtttaaggctgcggaagcggcaaagacagaagcggagaacctggagatcgtgcggatcatccgtggcatggatatgaccataccggaactgaatgcgttccgggaaagaatgaaaacggaactgccgacactggcaggattccagaaggaggaaacaagagctgatgatgaatttagagaaaatgaaagaacagagggcaccggggaagcacaggaaatggggcagtaacgtgaaaaaagggatttttgcagttaccacatttttatgtatggcaaccccgtttttttctgcccagagcatttatgcggcggagaacacgaacccggccatcgccattgaaaagccggacgggtggaaacagggagatacatccgtttccattactgtagatgccagccagatgggggaaggcttcaaagtcgcaaaaatcgaagcaaaggctggaaaagatgggagctggcaggacgttacggagtccagaagcattacaatcaacggaaaccagacggtttatgtgcgggtgacagatgcagaaggaacggtgtatgaacaaaaccgttccatccgctgttatgatacggaaaaaccaaccctttctgcttccctcacggatggtgtgctgaccattcagggaaatgatgcggtatccgggatctctgcggtaaccgtcaacgggactacctatacggacctttcggatggaaaactgaagatccagctcacacagaaagactttaccacaaagcagattgagatcacagtgacggatggtgccgggaatacttccgataagtacaccctccagaacccgtattatgaatgggcggtgcgtcaggcacaacagcagaatacagcgaacaacgatatgagtaccacgggcactgcttctacaacggaagaagcgaccacatctccgcttccgcaggatgcacaggcatcggaaccgacggaggcaaggggaaccgtggatgaccgtactgtgacggagattgaagaagaactggcagcatccggggaagatgcagaaaacattacccagacagcaacagaagggacgaaagagttttacaccatttccaccaaaagcggcaaggtgttttatctggtcattgataattccaagtcacaggacaatgtgtatttcctgacggaagtcagtgaaaaagacctgatgaactttacgctttccgatacggtaactctcccggaagtggataccgtgtatgcagaaccggaaacagaggaaccggagccgacgcaggagccggaagaggaagagcaggaaacagaggaagtgcagatgccagaggataaatccccggttggttcctatcttctgatcgggctggcagctgccggtgcgttaggtgccggatattacttcaaggtctataagccgaagcatgaatacgatgatgaggatgaatatgaggacgatgagaccgaagaagcggaagaacctgaggaaccggatgatgcggaagaagagacacttccggatgaagaggatccagaggaagtcctggaagaggaggaggaatcataatggggtgttttgatgcagatgaaaaaatatccggttatttatgcagatccgccgtggcagtaccgtgtgtattctaaaaaaggattggggcggagtgcagagagccattaccccacaatggggattgatgagatccgtgccctgccggtggcggagattgcagaaaaggactgtgccctgtttttgtgggtgacggtcccgtgcctgctggaagggctttccgtcctgcaggcatggggattccagtataagaccattgcttttgtctggatcaagcagaataagaaagcggacaacctgttctgggggatggggtactggacaaggagcaatgctgaattctgtatcctggcaaccagaggttcaccgaaacggcagtctgccggagtccatcaggtgattgtatcccacatcgaggaacacagcaaaaagccgcaggaagcaagggagaggatcgtgcagctgatgggggatgttccccgcattgagctgtttgcgaggcagaagacgcccggatgggatgtctgggggaatgaagtggaatccgatattgaaatggagagcagaaaggaagagtgagatgaagttagtagtagcagaaaagccgtctgttgcgatggctctggcgaaggtggtcggagccagagaacgaaaggacggatatgtggagggaaaggagtatctggtgtcgtggtgcgttgggcatctgatagcattttgtgatgcatcggaatatgatgaacgttacaaaaaatggagatatgaagaccttccgattataccggacgaatggaaaaggaaagtccttgacgggacaaagaagcagttccagattttaaagaaactgctgaacagcaaagaagtggatgaggtgatctgtgccacagatgccggaagggaaggggagctgatcttccgtttcgtctatgagcaggcaggatgcaaaaagccagtcaaaaggctctggatctcctccatggaagaacgtgcaattaaagaagggtttgcatcgttgaaagacggttcgtgttatgaagacctctatcagtcagccttatgcagggcaaaagcagactggctggtggggatcaatgcgagccgtcttttttccgtcctttataaccagaacctgaaagtgggcagggtgcagaccccgacccttgccatgatcgtggacaggaaccagaaggtgaaggagtttgtaaaagaaaaatactatgtagcccacttaacattcggggagtttgatgcagtttccggtcatttccagaaaaaagaggaagcagacaaggtggcttcggactgtagtgaacgtatgtgccaggtggagaaagaagatatccagacaaagacggtccgctccccgaaactgtatgacctgacttcgctccagagggatgccaactggatctttggttatacggcacagcagacgttggacgctgtgcaggaaatgtatgaaaagaagctggtgacgtatcccaggacggacagccagtatctgacggatgagatgggggaaagtaccagaaagctcattcaggtgctgttatccaggatgcctttcgcagaggggattgcgtatgaaccggaggtctccaaagtactgaactccaaaaaggtttcagaccatcatgcaattatccccacttcggaagtggagaaagcagatcttcagaagctgaaagaaaaggagaggaacattctgtatctgatcagtgccagagtactcactgcaacagcagattcctatatttatgagacccataagtgccagctgacctgcaacttccatacgttttatttcaatgcaaggaagacaaaacaggaagggttccagacgatagagaagaaactgaaacagtttttgggtgtcagggaaccggagcaggaagcggagtttgacctttaccttggaaggaatatcggtccgtgcagcacttctgtttctgaaaactttacccagccaccccgccagtacacagaagacactcttctggcggcgatggagagggcaggcaatgaagaactgacagaggatacggaaaagaaggggcttggaacaccggcaacgagagccgggatcattgaaaaactcatccagtccggctttgtaaaacgggaaaagaagaatctggtgccgacagatgcggggaatgtcctggtcacagttcttccggatgagattaagtccccgaagatgacagcagagtgggagatggcattaaaccatatcgcacaggggacagagacggcagagcatttcctgagtggaattacagatatgctgggagaactgatttcccgttaccattcgatttcagaggaggagagcagccgttttccgggaacagcaaggggagaagtgattgggaaatgtccggtctgcggcagtgatgtgcgggaaggtaagaagaattattactgtaccgggcaggaatgccgcttttctttgtggaaggatgaccatttccttgcaagccaggggaagaagatggacaaagcaacggcaaaaaaattcctgaagaaaggcaaagtccattacaaagacctggtatcgaaaagaaccgggaaaagttatgaagctactgttgaaatggtagccgatggtgagggaaaagcacagtttaacctgcattttccccagcgttagttgaggatcaggcagccagaaggctgtctgttttcatataaaaaatgaaagagaggacatgatctatgagaagaacagaacatttaaggagactcgtatccggatttctggcaggaatgacgctgttatccacagtgttatcgcccatgacagcctatgcggcagaactcaaagcggaagaaaagccacccctttatgaagaggtcaaggatctgctggacgaagacgaggtggtaaaagccaaagattatgaaattactgttggcagtgaatttgatgtcacctgtgattttaccgggctggagatcaaagatgacaaaaaagtgaaagtcacttttgaggaagctaagaatggagaggggaaggattttgctttagaccacgcagacagctataaagccgtctactatgtggagccggtcaatgaggcacatccgaagtaccagatcagcagaaatctgatcgttaaagaggcggaaacagaagtgcaggctgcttcagaaggaggcggtgaagatgccggttccggcggtacagaggaagcggcagatgacggggaggcagactcgcagacattatctgtagaggagaatgaaaccgcagaaacggaaacttctgtggaaacggaaaccgttactgagacggaaacagaaacagtagaaagctctgaagttcttccggaagaggacctggatgcagcattggaagaaagcgaagatcaggaaaccgttgatccggagaccgggctttccgtatctgatgtactggaacaaggcgaagaacagggaattgatatgctgagcctggaagaaggcgaaacggtacagtttcaggcacaggcactgtttgcaagcgccagatccacgacttccgtcagtgtaaccagaggggcatattactattatgcagattatggtctgggttcttacctgaccgcaccttataccgtaaagtttggtgatgttactgcaactgcctattgcgtacagccgtccaagccgggaccgggggatggaacttatacgatcacaaaacttagtgacggaaagacactggctaaagtctgctattacggtacaaaagccagcggggatgaaggatttttcgcagagaagcatccggatttttctaccggaaagcgttttatcattacccatctggcagctgcttatgcaaatggaagcagtgatgccttttccggcaccaactctaccggacaggcactggccatggaactctataactactgtgtgagccagccggagatcccggatgtggcaatgtcattttccaatgccaatgtaaaagcctatattgacggcaattcccagcgaacggaagagatcacatttaaggcagatgtgcttcagacgattacgatgaagcttccgtccggcgtgagattccataacgtttcaaccggaaagaccagtgcggcaggggcaagcgtagaagtgtccggcggcacaaagttttatctttccgcacctctgacacaggcggaagatgtaagcggttcctgggcagtgaccatgaagggaagcattaccaaggattattccgcttataagatcaccacaggatcatccacacaggacctggcactggtatttggagaaggtgtcacagatgagaagtatgtggatttcagtgtggaatgggtcaaaatggcaaagattgagattgtaaagaaggatggcggaagcaatgcgaaggtagccggtgcggtctatggcatttacagcgatgaagcaggaaaaaacctgattgcaaagatgcctgcaaccgatgccaacggcgcatccagtatcacgattgaaaagacacagaataccgtgtacctgaaagagatttccgtaccgaacggttatgtgctggataccaaagcctatgggatcaacctgatcatcggcgggaccacaaagaaagatgtgactgacaaggaacagtttgcagacctgaccgtttacaaggaaggggaagtgctgaccggtgcttctgtcacagattccggtgtggtgttccagtacacaaagcagagattgaaaggcgctgtgtataacgtgtatgccggagcggatattaaagcggctgatggaagggttattttccagaagggtgccctggtaaaagaggggctgaccaccggtgaggatggcagtgcaacccttaagaacctgcatcttggcacttacgttgtaacagaaacgaaagccccggcagattatgtgtgcaaaggggaatcccaaaccgtcactttaagctatgcagggcagaacgtggaagtggcagtaggaaatgtgacctttgccaatgaccgccagaaagcaagcgtatctgtgctgaaacaggacgataccacaaagaacccgctgtccggaggaatctatgggctgtatgcggcggaggatatcgctgacgtatccgggaatgttgtggtaagaaaagataccctgattgaaaaagcaacaaccggaaacgatggaaacgctgtatatcaggcagacctgccgatcaaccacagctattatgtgaaagagctgcaggcacctgaaaactacttccgaaacagtgaggatgtattctctttcagatttcagtacaccaacgataaacaggcatccgtcgcatttacccatacgtttgagaatgaacgtgtcaatgcaacgatccatctggtcaagaaggataaagagaccggaagggaaacacagggggatgcagcctttgaaggtgctgtttacggagtttatgcaagggaaaacatcatccatccggatggaaagacaggcatcctttataaagcaggaagccaggtggcaaccatgacagttgataaaaagggtgatgcttctgtagaagacctgtaccttggaaaatactatgtgaaagagatcacaccgccggttggctacctgatcgacgagggtgagtatgacctggaatgcagttatgagggagaccttgtaaagactgtggagcgaaatacagaatcttcggaacaggtcatgaaacagccgttccaggtaattaaagcggcgaacaatggaaagacagacgcagacctgttaaaaggtgccggatttactgcttatttaaaaaacagcttaaagaccaatccggacggaagctacgattttgcatctgccaagccggtagtgctgaccgcagatggaaaaacagagatgtttaccgatgccaaaggctatgcctgcagcatcccgcttccgtatggtacttaccttgtgaaagaaacaacaacaccgcacaattataagccggtggatgactttattgttaccatcagtgaaaaccatccggatgaaccgcagatctggcggatccttttggatgatgaatttaaagcaaagttaaaaatcgtgaagaaagacgatgaaacaaagagaccggtgctggtggcaggtacagaatttaagatttatgacctggaccataagaaatatgtggaacaggttactacttacccgatcactgttacccacaaatcatacttcacagacagtcagggttacctgatccttccgaacaatttaagcatcggacattaccggatcgaggaagtgacagccccggatggctataccttaaaccagaattatgtggagatcgcagtggattccaatactgcataccagatggattctgtcagcggggatgtggtgattgaagtagattacgaaaaccatccggtcaaaggaaagctggctgtttacaaaaaaggtgagatgcttgctggatttaacaaggattttatttacgaagagcagttcctgaaagatgccgtctttgaagtgtatgcggcggaggatatttactccccagattatcagaaagacgcagatggaaaccggattgtagtctatgcaaaagatacactggtgactacaatcacaaccgctgaggatggaatggcagtagctgaaaaccttccgcttggtgcttaccgagtggtagaaaaaacagccccggaaggttttgcgttaaatccggaggctgcagaagttgtctttgtctatgaaggtcaggataccccagtggtagagcaggaagtgaccgtcggtgatgagagacagaaggtagcgattacggttgaaaaacaggatgcggaaaatggtgctgttgtggcaggtgccgtatttggtatctacaacaaagaagatattaccgcagacggcaaagtaatcgttgaggcagataccctgcttcaggaaatgacttcggatgagaagggacaggcaggctgtacactggatcttccgcttggaagctactatgtgaaagaactgaaagccccggcaggattcgtttcctccaatgaagtcttaaactttgatgcttcctatcagggacaggatgtggaaacagttgttttgaaagctgtaaagaaaaaccagccgaccatagtggagatcacaaaatctgacattaccactggaacagaactggatggagcaagcctgaaagtgctggataaagatgggaatgttgtggatgaatggacttctgttaaggatgccccgcatgtgatcaaacgtctggtggcaggtgagacttacacactccgggaagaatttgccccatatggatacctgaaagcaacggatatcacgtttactgttgaggataacggcgatgtccagaaggttgaaatgaaggatgaagtgccgaccgggcttctgatcatcaacaaaaagggtgaattcctggataaagtaacgcttttggataatgcaaaaggcacggtggagcatctgtttgagtatatcaccggaagccttaccgaagttactttcaacgtttatgctgcagaagatatcaaagcggcagatggtgtcagcgaggattacttccaagcagatgaactggtgggaaccattaccacagataccaatggtattgcacaactgggggaccttccggttggaaaatactatgtgaaagaggcagagactgcccatggttatgtgctggatggggagcctaagtttgtggatttaagttaccgtgaccaggataccccggtagtaacgtatgatgaagcatggcagaataaccgccagaaagtcaaagtgacagtcctgaaaaaggaaaaagacacggaacgtgtactggcaggcggtatcttcggattgtttacaagggaggatatcaaaaatgccggtggcgatgtcctgctggaagcagatacgctcattgagcttaagaccacggatgaaaatggtcagatcacctttatggcagacctgccggtagacggaaactattatgtgaaagagctgtatgccccggatggttttgtgaccaccaatgaggaacaggatttcacctttgaatacgccggtgcggaccaggcagaggtaagctatgattttacctttgaaaatgaggcaacaaccgtggagctgacaaaatccgacctgacaacaggggatgaactcccgggtgcccacctgaaagtgactgatgaggacggaaatgttgtggatgaatgggtatctgcagaagaagcccatgtgatcaaagaactggtagttggcaagacctacaccatgacagaaaccaaacctgcagatggatatgttaccgcagaaagcatcgaatttaccatcgagaatactgcggaaatccagaagcatgagatgaaggacgatgtgacaaaggtacagatcagcaagacggatatcaccggagaccaggagatcccgggtgcgaagctgacgatcctggatgaaaatgaccaggtaatggaaagctggacttctacagaggagccgcattatgtggagaagctgccgattggcagatacacactcagagaggaacaggcgccgaaaggatttatcctgacagccgatgtctcctttgaggtgaaagataccggtgagatccagaccgttgttatgaaggatgatacctcaaaaggtaaagtgatcctgaataaaacagataaggaaaccggagagccgttaaaaggcgtggaatttgaactccgtgacagcaaaggaaaggtgctggagaccttaaagacggatgctgccggtcatgcggaaagcagcctttatgagatcgctgattacaaagacggtaaatttgccggtgagaagaaatattatctggtggaaaccaagacgctggatggatacacactggatgaaactgagcatgaagtggtatttgcctacaaagatgacagtacaccgattgtggaagtgacctttgacctgacaaatgacaagccggaagttccacagacatcggaaggcacaccgggaacaccatcagccggtaacccgaagaccggggatgagacaaatctctggcttccggtggtactgctggcagtatctgtaagcggcattgccggacttctggcagccagaagaaagagaaaaagaaaatagtaaccttatatgagcagggagccttaattcagggctcccttttatcatagcaaaaatcaggaaaggacaggtaaagaatatgaagaaaacaatgaacacagtgcaggcagggagagaaatgcaggagagatcattcaagagaatgatggcataccagaaaaaagcagagcaggcagtcaacaaaaagagaatgaaccagcacatgattagaagggggtaattgtgtatgatgaacagaaaagatttttttgaatatgtaaaagacaatgtgaaggactatcttccggaaaaatatgcggatgccaatatccatctgcaggaagtggtaaagaaaaacgggctgacactgacggcggtggtcattcccgcaaaagacagcaatattacaccgaatgtatatctggattccttttaccaggaataccggaatgggaaaaatccggatgcctgtgtaggggatgtggcagacctctggattgaacagatggatacagatctgaatgttgatgtgaatggcatgatggattacgggaatgtcagggataaactgcagatcaggatgtgcgacccggataaaaacaaagaatggctggaagataaggctgtgaccatgcatggggatttcgctgcttattacacggtcaatctgtcggaaaataaagacggcattgcttcggtttccgtgaccaaagcatttttagaggcatggaagattgatgtccagactctccatcaggatgcgatggcatcagataagaaccgaggaccggctttatacgcaatgaatgatctgatggagtcctctattatgggagaaaaaccccagaatctgttgaacggagacagaagggcagaggaatttttcatgcccatgttttgcctgacgaacgaaacgaaaatgaatgctgcatccctgatcctgcatgaggatatccgaaaacagatcggggagtttatgaagggcgatttttatatcctgccttcctccatccatgaaacacttctgttgccggataatgggaatttcgatgtgaaagccctgaatgctatggtaaaagaagtcaatgcaacagaagtagcactggaagatattctttcggataaagtgcagttctgtgatggcagaacagccgtgatggaaaatgcggagaaacgggaagcacgtctggaaaaagaaaaggcggctgcggcagaaaagccggcagagaaaaccgggcttcatggaaagctggaaaaggcgaaggaagagatgaaagccggggatgtcctgggaaagccacagggtaaaacgagagatacggctatggtaatgtaacaataataagcagagttataaggggatttccattgtggaggttcccttatatgaaggaggatgtatatgtcagagtggtgcttatatggtgatgataaaagagaaaaatttgaaagacggttagaaccggatagccttgaaggcgagttaatcaggtataaggaagttttgggtgaagaatttggtatcaaagaatttctgactattcaggatttaagagtaaaggcattgatagcggaggcaatcaacaatgtaccggaatttttactggatcagattggaaaagccaggaacagttatgagtttccttcccttgtaacggaacttggacgtattgcagatgttatggaagaggttgtggagggagaaggggaatgagcagcaaaatgaaagaggaagaaagaaaaagattatccggacatatccggaaatgcctggagtcacaaaaagaccaggagtttattcttcaaattcccttaaagagaggagcatcggaaagtgagaagaaaatacggaattgaccaggtatcgattcgtcttgtaaaagaagcaccgatcctgagtgaggaagagatctctacaccggaagatgcgatccgggtattgggagatacctttaaagactacgaccgggaagtggtaggagtggtccatcttcggagtgataatgttcccattaacatgactatcatcagtatggggacactgaaccagtcactggtgcatccgagggaagtattaaaggcggcgttcttatcgaatgccgcttctatccttctgttccacaaccatccaagtggcagcctgaacccatcgaaggaggacattgcactcacgggcagaatgcagcagctttgtatgctggcagggatccctgtgatcgatcatgtcattctcggcaacgaccagtcctatttttctttcagggaaaaaaagattcttcctatggagcagattcaatactctgtggatttgaatgatatcaatctgaaagtggcggaaaaggaagcagagaattatggatatgagaaaccacataaaaaatcaatcaaggaatccttagaggaaaaccggaaaaagatcgcatctggccagaaaacatccggtgtgaagaaaaaccgggaaacgacgatagaatgagaggaggatgaatgggtatggcaaataaattatatgccatggaacagctgacggaagaagtcgcaaaggacatcgcagcaaagccggaagagtggatgcgttttctggataccgcatcccggttatataaatacacctttgatgaacagcttctgatctttgcccagagaccggaagcaacggcagtggcatccatggaggtgtggaataagcggatgtaccgatggatcaggaaaggctcgaaaggaattgccctgattgattatacatccggcccgaagaaccgcctgcggtatgtgtttgatatttcggatacttataaggtgaggaatctggggaaagacccggctttgtgggtgttgccacagaatgaccgtgcctttgcggcagattatctgcagagagcgtatggattggacgaaggagatggcgggcttgccggaatcctgtatcaggcagcacaggaaagtgtgcgggagtggcttccggatgcttttgatgaactgaaacaggatgtgcaggggacatttctggaagaactggatgagcagaatcaggaagtggagttccgggaccttatgactgacagtgtatggtatgtccttttaaagcggtgcgggatagatgcggaggagtatctgtctgctgacagcctgcggcacatcacggattttaatgacctccgtgtgcttggacaccttggcacggctgttaatgagatttgccgcccgattttgatgcagcttggacggtatgtgcttatggatctggaaaatgacaggaaaacggttgcaaaagaatcggaagtggtctataatgaatttaacacgttaattcgtgaaagtgaagaaattacaacaaaaccagagatagaagaaaacaaggaggaaacagagcatgagagagatcacttacagcaggaacggggattatctgatcccggatatcaaactggaggagaccaggggaaccatcgggaaatacgggatgatgaggaaggaatatctgaggaaccacaagaaagccagattcagcatactggcactgcagaacaggctggacagccatctgatggaagtggacagcgaagccagacagaaagtggaagacctgaccattcagcttctggagaaagacccggcaccggagaaatcagccgacagcatggcatggacccgtcacatgaaccggatccgggcacaggcagaggaactggtgattcaggagattatatacaattaagcctgtttcccacagaggaagaacagtttggagagatcaggaaagcggcagctgcactcacacagccagccgctttttttgtttcggatgagatcgtggatgatgtgcttcgtaccggaagcggacggaagaatacattattccatatcactgcaaaacttgtggaaggaattgaccatgaggaactgcggagctttttgattcaggaatatggtaccggtgggaaagggtttgagttttcagggcaaaaattcagtatctggtatgatggggacgggatgcgtttccgacgtggggaatccgcaagacacaattatgaccgtatgcttacgtgggaagaagcggcaaaccgcattcaggatatgtatgatgcggggacgtatgtctccaacgtgattatgcaaaattcgatcaaagtggaatgtgacgaactttccagcctgctggcactccatttccgggataccggtgctatcaggggaatatacagccatacagaaacgagcgaaagtttccgggcaggtctggatgatccggaacagacaagggagtattaccagatgcttgtggaactggaacgggatatggaacgtcatccggaaaactatatgaggtaccagatccgaaataatccgatatacaagcagagggtctatgaccttggaaggacgcttggctggagacggcaggaagaaatcgtaacaccgccggaaattgcttttattacgcaggatgagattgactctgttttacggagaggtggaaatgtagctggcggaaggaaccgtatctatgaatttttcatggagcatcatgatgaaaaagaaactgccgattttttaaagcatgagtatggagatggaggatgcacgccgggcattcagggaagcgatctttccgatgagtggcatgatgcaaaaggaatccgtttgagcaaagggcagatttccaacccgagcctgagaacacttatcaagtggaaacaggcagcttccaggacaaagcagctgatccggatggatgattttctgtcaccggaagaactggaaaagtatgaagaacggcaggaagctcagcgtcttgctgatatggaagaagtaaagcagtcactggaaacggaggaggttcctgaagggattgaggaagttcatgaagaagttcatacggaagaaaagtcggaagaaaacgggcagccattaagggcagaagatgtgcagaacctggtattagtaaaccgccagtattcctctgtgagcaggacaacggagtatgactttacctgtgagatacgtggggagcaggatatcctgcattatacggtggaataccatgatgacggggaaggctttaccatccatacggaaaaagatgatatctgggagcggatgtccgaaccggaactggagcggctggagatggtactggaacgggaagccctttattttcagtaccatgaggatattgaaaatgcatcgaacctggaagaactccaggaagtcagctacagtatcatggaaaatgaatccatttatttccggcaaatatcggaacgtgtctggaatgagtatggggaaagggaacgtgtattatctgcggagataccggcagtcaattttcatatcacggatgaccagctgggctacggaacagcaaaagaaaaattcagagccaatgtaatggcaatccaggttttgaaaaaatgtgaaagcgagaaccgttatgcgtcaccggaggagcaggaaattttatcgaactatgttggctggggaggcttgccagatgtctttgatgaaagtaaagcatcctggagtgatgagtatcaggaactgaaaaatctgctttctaaagaggagtatgcggcggcaagggaatccacgttgaatgcccattatacacagcctgttattattcagagtatgtaccaggtgcttcagaatctgggatttgaaaagggaaatatcctggaaccgtccatgggtgtaggaaacttttttggaatgctcccggacaagttacagcagtcacggctttacggagtggaactggacagcataagcggaaggatcgcaaaactgctttatccgaacgctgatatccagatcaaaggatttgaaaagaccgattatcccaatgacttctttgatgtggcaatcggaaatgtcccttttggttcctataaagtgaatgaccgccagtatgacaagtatcattttatgatccacgactatttccttgcaaagaccattgaccagttacgaccgggtggagtggctgcccttattacaaccaagggaaccatggataaagcatccccggaggtaaggaagtatcttgcagagagggcagagcttctcggtgcgatccgtcttccgaacaatgcttttaagtcgaatgcaggaaccgaagtcagtgcagacatcctgttcttccagaaaagggagagcatttccatggaagagccggaatgggttgctcttggagaggataagaatgggattaccataaaccagtattttattacccacccggaaatggtacttggaacgatggcagaggtgtccggaccatatggcatggagactgcctgccttccgctggaaggggcagacctggcggaacagctggaagatgccgtggtaaaaatccatggaacgatggttccggcagtaacggcggaaacagaactggatgagatcatggaaagcattcctgcagatccggctgtccggaactacagttttactgtggtggatgaccagatctattaccgggtaaattccctgatgaatccggtgaagctgccggcagccacggcggaacgtgtaaaaggtatggtagagatccgtgaggtagtccgggacttgattgctctgcagatgcaagaaaatgcaacggatgaggcgatacaggagcttcaggtcaaactgaatcaggtctatgattcctatacggaaaaatatggggtcatcggaagcaatgcaaacaaacgggcattctccgatgactcttcttattgtctgctttgttcgttggaggatcttaatgaagacggtacgttgaaacggaaagcggatatgtttaccaggcggacgattaagaaagcagtagctgtgaccagtgtcgaaacttcggcggaagccctgacgatttccctgaatgaaaaagccagggttgatcttccctatatggcagggctgacaggtaagacggaagagaaagttgcagaagaactgacaggagtaatctttcgggatccggtcaatgggcagtgggagactgcggatgaatatttatccggtaatgtccgggagaaactgaaaacggcaagaatttttgcggaaaaccatccggaatttaccagcaatgtaaatgcccttaagcaagtgcagccggtagacctggatgcatcagagattgaagtccggatcggtgccacatggatcgccccggaaatataccgggattttatggcagaattgtttgatacaccggggtatcaggtcggtacgataatagacatccggtattcggaagccagcggagtatggaatatcagcggtaaaaatgcagacagtgaccggaatgtactggccacagcaacgtatggtaccagccggatcaatgcctataagattctggaagaaaccctgaatttaaaagatgtccggatctatgacacaaagctggatgcagagggaaatgaaatccgtgtgttgaataaaaaagaaacgatgctggcaacccagaaacaggatgcgatcaaggaagcatttaaggactggattttcagggaccaggaacggagggaaaagctgtgccggatttataatgaccgtttcaattccatacgtcccagagaatacgacggcaaccatctgacctttccgggaatgaacccggaaatagagctccgcccgcaccagaaaaatgcggttgcccatcagctttatggggataatgtcctgcttgcccatgtagtgggaagcggaaagacttatgagatggtagccgcagctatggagagcaaacggcttggcattgcccagaaaagcctttttgtagttccgaaccacctgacggagcagtggggcgctgaatttttacagctctatccgggagccaatatccttgtggcaacaaagaaagattttgaaccagcaaaccgtaaaaagttctgtgccagaatcgcaatgggtaattatgatgctgtgatcatcgggcattcccagtttgagaggatccctttatcggaagaacgccagaagatggccattgaaaagcagatcgaagaactggaagcagggattcagcaggcaaggcttgaggttggtggcagccgttttacggtaaaacagctggaaaagacaaagaaaagtctcaggaggcgtctggaaaagctggaaaacaaagagaaaaaggatgatgtggtaacgtttgaagaactgggggtagaccgtctgtatgtggatgaagcccactattacaaaaatgcgttcctttacacaaaaatgaggaatgtggcaggcattgcccagaatgaagcccagaaatcggcggatatgttcaacaaatgccagtatctggatgagattaccggcgggaaaggcattacatttgcaacgggcacaccgatcagcaacagcatgacggagctttataccatgcagcgctacctgcagtatggcaaactgaaccggatgggattgggacattttgattcctgggcatccacctttggcgaagttgtaaccagcatcgaactggctccggaaggtaccggataccgggcaaaatccagatttgccagattttacaatatcccggaacttatgagcatgttcaaagagattgcggatattaaaacggcagaccagctggaacttccggtgccggaagcagagtatgaaacggtggtgttaaaaccatccgagcatcagaaagagattgtggaaagccttggagaacgtgcagaggtgatccgggatggtggtgtggattcctctgttgacaatatgttgaaagtgacaaatgatggaaggaagctggcactggaccagcgtcttgtgaatccattgcttccggatgatggagacagtaaaatctgtgcctgtgtggaaaagagttttgctatctggaaagagaccgcatcaaaacggtcagcccagctcattttttgcgacctcagcacaccaaaaggggatggaacctttaatgtttatgatgatttgaaaaagaaactcatggcaaaaggggtaccggaagcagaaatcgcatttatccatgatgccaatacggaagtgaagaaaacggagttgttcagtaaagtaaaatccggacaggttcgttttttactgggttccactgcgaaaatgggcgctggtaccaacgtgcaggaccgtctgattgccctgcatcatctggatgtgggctggaaaccttctgacctggaacaaagggaagggcgtatcatccgtcagggtaatatgaataagaaagtgcatatctatcggtatgtgacagaaggaaccttcgacagcttcatgtggcagttgatcgaaagtaagcagaaatttatttcccagatcatgaccagcaaatcaccggtacgaagctgcgaggatgtggatgatacggcactgtcctatgcagaagtaaaagccctggcaacggggaatccggcgatcaaggaaaaaatggcactggatgtggaagtatcaaagctgaaactgctgaaagcgaatttcgtgagcaaccattatcggctggaagatgatatcgcaaagaatttcccgcagcagatagcagtacttaaagaaagcatcgaaggatacaaagcggatctggaaaagtatcaggcaaataagatcacggatccggagaaatttgtgatggaagtcggcggcacagtattttatgagaaaaaggaagcgggagcagcccttcttgcggtctgccagtccatgaaacaggcagatgccatgatcaatgtcggacagtatcagggattttcaattcgcttaaagtttgattcctggaacaaggaatttatccttttcctgaaaaatgaaaatgtatatcgtgtcagccttggctccgatgaaaacggaaatatcatcaggatcaataatgcattggaggcaatcccgcaaaaactggcggaagcagagcaaaagcttgagacagtgcagggacagctgaagaatgcgatggaagaggtgaaaaaaccgtttccgaaagaggaagaactgaaccagaaactggagcgtctgtcggaactgaatgcattgctgaacatggacgaaaaggaaactgtgatggagggggaagaagagcaggacgaggaaaaagaggaacaccagtcccttcatgacagaattactgccatcaagcagaacagccagaaacaggatgtgaaagaggctgcagtgagaaccacagaagcgtgtatcggataatcttttgatatacaagacaggttataaggtgtaaaataggggcacagggttgtgccccttaaaatgaacaaattggaagtcgaggagacaagggtattcggataatgtatccaaaagtgagtttagccagagaggaaatggggttaatgattgaaatattgtttggtgacagcgaagccggttccatgaaagcagcaaaaaataaaatagtggttggtaaggttaatggtcctgtttctgtatggatggcagggaaaaagacgccgccacaaaatccttttaccggatggatagaggggacatcggaggaagtgatttgtcttggctttatgatggatattggaaacatcaaagtgcaaatggacagtccttaccgcagggaattgatttattctatgtatgcgcaaaatcagtgggaacaggatggagagacagaggaagaactgaaaaatgccggagatgtttatgcaaaagaattatatcgattgatggaatttctggatcacggagaagctgtcaggatatggtacagcgatactccctattccagatgcggtttttatagcttgtgccagatattaaaagggtatgaaaacgaaatatcagcagtaaagcttccagcgcatatcgttcgggagaattgcattttctcgtaccaaagttggagtgaggtatccgcagaagaatttgcaggatttttaccatatgaaaaagcactttcaaaagaagaagttcgtatgtatgctatgttatggagtgaattgattgaagagaacagcccgcttcgcgcggtagttaatggcaaagtccttagcgttccggaagatttctatgatttcctaatatggaaaaggctgaaaaatgttccattgaaagaggccagactgattggggatatccttggtcagtcgcaaattggagtgggagactggtggtacaatcgaagaatagagtattatattaaacagggggagattcgtgttgttgaagattcaaagaataaatatgcaagaatgatttgcagcaacagaggataaagttgattgatcactttattttcaggttaaagagttagataaatcgatgttcgtcgaattaagttaatcatgccacaaggtttgattataaatgcaaagataaaaacgcaatgtacatcattgatgtgctagagccggtaggtagcccggccgtcctatgtaatagggtaagtaacctgcccctccgggttgtccattctttgttcatcaattattttaggagggatttttatggacaaagtaagtggaaaactgacagtatattttgaagaaccattttggataggcgtatttgagcgtatcgaagacggtaaattgtctgtgacaaaggtaacttttggtgcagaaccaaaagattacgaagtgcaggaatatattcaaaaatgctatttcagtttgaaattcagtccggctgttgaaactgttgtaaaagaaataaaaagaaatcccaaaaggatgcagcgtgaagcgaaaaggcaaatacaggaaacaggcattggcacaagatcgcaacaggcattgaaattacagcaggaacagaacaaacaggagcggaaggtcagaagcagggagaaaaaagaagcggaaggactgcgaatgtttgaactaaaacagcaaaagaaaagagaaaagcataaggggcattagccccttgactttgctcgttaaaatcggaatttgagaggaagaagatttaatggaaagacctattttaaataaagacttagatagccaaatatttcgcaattattacttttcaaaagaagaattggtaaatttttgtagagaaaatggcttgcctacatctggtggtaagatagaaataacagataggattgcatattttcttgacacaggaaaaatattgtctgcttcgactaaaagaaaaagagcgacaatagtatctaatatttatgaagatactaaaattgaggcagattttgtttgttcggagaagcatagagctttttttagagaacatattggaagtagtttttcgtttaatgtagcttttcaaaaatggctgaaaagcaatacaggaaaaacctataaagaggcaattgtagcttattatcaaatcattgaggataagaaaaagggaaaaacaaaaattgataaacagttcgagtataacacttatattcgagatttttttgcagataatcaagggaaatctttagaggaagcaattaagtgttggaaatataaaaagcaaatgcaaggacataatcgctatgaaagagctgaccttatagctcttgaataacaacttccagttggtagagctgaataattattattctttgagtggaatgattctgtttttcagcgcagaaattttaaagaaaagtattgaccttcacggaacgtcatagagtatattcagattatcaaagacaggaggataatgataatgatgaccgtaaaggaaattgcagaaattacagggatcagtgcacgcacgcttcattattatgatgagattggattattgaagccgacagcaaagagtgaggcgggatacagactctatgatgataaagctttagaaaccttacagcaaatactgttttttcgtgagtttgatattcctttaaaagaaataaagtctattataacatctcctgattttgatagaaaccaaattctgcagatgcagagaaaaatgcttgttgcaaaaaaagaacgtatggagcgtttaattgcaagtattgatgatattctgaaaggagagaacaaaatggatttttcagtatttaatgagaaggaaatcgaagaaatgtttcagactatgtttgatcatatgcctgagaatctaagaaagatttcaattaacgagtttggaagtgaagaggaatggaaacagcattatattgaggttatgtcttcaagagatatgcaagagcgatatgcaaaagttatcgattggtatggaagtaaagaagcatttttgtcttttgctaacaatccaatcagtaaggaaacagcagaatgctttaataaacgaattgatacagttttgagaaaattattggcaagaagagattttccactggattcttttgaaatcaaagaagcagtagcagagtatggatttattatgaaaatgctttatcagattaaagatgaaaaactaattatgctttctgttgcagaatcatatcgtgatacgaaggtgcgagaaaaaaatgatgcagattatggtgaaggggcatcagatttttttgcaaatgcaattcagcatttttatcaataagtcaaacatctacttacttcaaatttctatggtggaaacatttaatgacatagaactcaaaagtaattaattatgttttatacccgacattttccggcagtgaaatacctgccggatttttcatgcccggaaggaggtgctatatgaagagaacagagaaagtattgttgattgtgtttttagttgtttcgttgatatgtgggaaattccttttggactactggcaggattcttatgacaacaggcagaattaccgtcaggtggaggagatggcattcccggaaaaggatacagaggaagacgggactggttcaaatgcggataatccaatgacagaggtagatgattttgattatcaggcattgctggatgaaaatgcagactgcatcgggtggctgaagattgatgataccgatatcagttatccggttgtacagggagaagataataagttttatctacaccatgattttcaaaagaattatgccatctgtgggacactaatgttggactaccggaatgatgttgatgctgggcaggaacatttgattatttatggtcaccaaatgaaagatggcagtatgttcaagcaattgaatggatataaaaaagaagagttttatcatgggtataaggagatcacgctatatctggaaaaccagaaataccagtatgaagtggctgctgtgtatgtgacgaatgtggcacaaagcggcggttattatgattatttacacaaagaaacacgaaaacaacagatggattatttacagaagatggcggcttatcagctttatccgacgggtgttaccgtcagggaggatgatgagctgctttctttatctacctgtgaatattccagcaccaacggcaggctgattgtacttgccagaagaattggagcataggaggaaaggcatatggcaatgaacaggaatatgacaacggcagaaaaagaagttcgggattatgcccagaaacagatggaacgggcagaacagcgggaaaacattttatttactgaggaacaaaaagaacaggttctggaatatgcggctatgaccggggatgattatgacatcaggaaaatggtcagagaccttgcagaagctgtccgttcctcggatgaagagaaggtggatgaaattctgaatgatgcaagagaggaaattgacgaattcccggatcgttccgttggtatggcagaactaaagggatatggctataccgcagatgatatgtttcctcttcgtcaggagatggcactggagcttcatcgtgtcggggaaaaggtgtattgcctgcaatcagatggctcccatggggactatgccagcagagagatgatactggaacatgaaggtctctatggaattgaaaaagaggcatggcagcatatgcaggagcaggaggacgaaatagattttgaggaagttggattatatcagcctccaatgacagatctggatagaaatgaagcattaaggatgttcgatgcaggggagacagtatatctgattaccacttatccaagaccgattgcggtgcgggaacggatggagattgaaagaggaccggagcgttatcaaatggagagagaagatgtggaacggatcaggacgttggagaaacggatgcaggagtatccgcagataacgtcactaaaagaggcgaaacttcttctggggacagaaaacagatatggaatataccagatcatagacggcagtttcggcagagaatataaatttatggatctgaatttcattgaaagacatggatatcaggtaaaaaaagaggactatgagttaatctattctgatgaaatgctatatggcgatacactggattctctgtatgagaagttcaatattgcccatccagcagattataacgggcattctttatcagtcagtgatattgtagtccttaatgagaacgggaatgtaaaagcctattttgtagacagtatcagtttccgtgaattgccggatttcctgcaattagagccggaactgaaccaggaggaagtggcttaccggatcggggatcaatacttttctatccaggtggcaacggaggggtatgattattccttttatgataaggagtataaactcatggacggaggcattttggatgatccggatatttctatgagacaggctattcaggatattttagaggacgaaggactggaacagttagaacggatacctgtagattatgatgaattgcgagaaaaagcggaagaagtagaggcagagatctttcaggaagcaagaagccagaggaatcgggtgtcggttatttcggatcataccgaagcggaagctggattaaatggaatgagccggtcagaaatcgaagagaccgtatgggcgattgcacaggcagagattattgaaaatgatctggataccaagatacaggctgtgcgtgtgtatggaagccgtacaagggatgggctatataaagaggattctgatgtggatgtggtaattgcttatgagggaacggtacgtgaggatgatttgttttccgtattgaatgaagcagggtataaggtcggaaatatgcgggtagatatgaacccgatcagaccggataagactggtacgttagaagattttcttgaaaaatctgaacggtatctggatgaaaaaacggagcagatgaaagccagaggggagtacaagccattggcaaaagtggaagagctggaggaagcaaactacaatatgatcgataacgtcctgaacaatatgcctccgaagaaagagccgtatctggaatactatgctgcagaatgtgatgaataccatagccttggcaaaatatataagagtaccaatctggatgagatccttgcaaaataccgggaaatcattgatgatccatcgttaagctactatggaaatggaatgggcattatttaccgtgacccgaatgatattttttatgatgaggcggaggtatctctagtcagtcggaaatcgatccggggagacagcctggatgatgtggcatttctggcagcacttccaatggtacatgaagcactggaaaagattgtagaggcgtttccggattttcgatattatcctccaaaagaattgaatgtccattattatccggagaaaatgacagcggatgaactggctgtagcactggatcaattagcggaagactttgaccgttatgattatcatgataactttaacccggaggaagatatggtggaaactgtcgcattagaattaagatgcggttatgcccataggtacattccgtttttgaaagatattattgatgaggaatgcgaagagtctccacgggcagaagaacttctggagaaactgaaggattaccagcctgagataccggagacagcagtaccggttgtccgcatcaatttctgtgaggataaggaaatgaacatttccggttatcagaagctgggaagcctggatgaaataacagccaaaatggatgcagaactggcttcacaagcagatccaaagactggaatgcctgagaaaactgtacagatgtattttacaatttactacccggatcgtgatcagatgcaggaattaaaagggaaaattaatattggagatggaaacggcggtattgtgaaccagttggaaaaccagaatgaaatgaagctgcatgatgaaagctggctgaattaccagaaggcaaagggagaagaatcttttcaggcatatatggcagaccttacggatatgcaggagcatgtgctgccgtatttgcagagtttctgtagtctggaagaaagagtaccagagagatcggtagaaccgactacggtatcaaaatcagaaatggaagcagggaagacaatagcatctgttgggaatgaaaagtcgaaaactgtggaatcggcgagaaagtctattcatgaacgattgaaaatcaataaagagatcattgccagacagcagggaaaagatagcaaagagaaaggggttgagcttgcgtagataattacatccaaatggaaaacagtagcaaaaatgaatgacacaaagtcctgaagctagccgtaagacatatggtttgcttcaggattttgcacttttgtaatgtgccattacctcaagtattgttgagaatacaatttgtctaatagatatgcctttctgcaaatattttcttggcggtataaatggcatttaaaactttgggaaaaccggtgtaaggaatacactggataaatgtttcaatgattttttcgggagaaagtccaacgttaagggagccattgatatgtacttctaactgtggttcacaacctccggtagtcagtaaacttgtaattgttatcatttcacgttcctgcatactaagttcaggccgtgtatagacatctccgaaagcaaattctatgatgtattttcctacatccggggcaatatcttgtaacgattgtatgacattttcacctccgataccgtcaatttctttaagtttctcagaccccagttcaaaacgtgtgctgctcattgcatttacctcctgtaagttttataatttgagcatataacttaaaccatagtttaagtcaagaacaatttgaggtgattttaaaaatgttaattggcgagatttctgaaaaaacgaacctgcctgaaagcacgttgcggtattatgagaaaaaaggattaatcaaagtagcaagagacggtggtggcaggcgtgaatatgaggagaatgatatcgaatggataaagtttatccgacgattaaaagagacaggtatgcatctcggagatattcagaaatattctgaactgcggtactgtggaaaaagtacaatgccggagcggatgaaaatattggaagtacatagaaaatatgtgttagaacaacggcaaaaatggaatgagtatttgcagaatctggatgataaaattgagttttacagacaagccataaatgaacaaccagaaggtaacgattgatttctatatttctgacacgataacagcaatgtatgcaatattgtccggagtttgatataatgcgtctggatatgtatgaaatgagtgaaaaacagaatattgattggagaatatcagatggaaaataaaaggaaattgaataaagaagaacgaaaacgccgccgccttcaaaaaggtaaacagtggctgcttacctatcagggcacagcgaagcacatggtaaagcattacagggaaaggttccatgtggattctatgacagcagtaaaggatttgcaggaactgggtgttaattatacgcaggaacaattggataatataaaacgggcagaggaagaacgattaaaacaaaagcgattacagaaagaaaaaaagaaacgtgaaaagtatgaaactatatatgaggattgtgatgatcggtttgcatttattgccgggtatacgtctggaggagcgccttatggtactacctgggaagaaataggaattgatccggaacttccatttgaagaaaaggttgagcgtctggctgagggaaattattctttaacagaagaggttgaaactaactgggatgatgagatattgaaagtgctggtccttccgggtttatttagtgtctgccaggtggaggactattcgcaggtcgatctggatgctgattactgctttataggaaaaacagatgaggaaaaatctctggtatgccgtacaggggatgtaccggataatacgatacagcagagtgacggctggagagcgtttcgcatacagggagtattggatttttctctgattggtattttagcggaaatatctggagcattggccagatatgaggtcggactatttgcaatttctacatttaatacggattatattttggtaaaagataaagattacaaacgtgctgtaaaggcattaacttcagaagcatatcggattattgaaacagagtgaaaaggaaagtggtacaagtgagtaaaaaactggcagcatatttttccgcaacaggtataactgcgagagtggcagaaaatttagcagattccatcggagcggatttgtttgctattatacctacaacaggttacacaaaagaagacttggattggatggacaaaagttccagaagcagcgtggaaataaggaatgaaagctgctgaccgaagattgcttataaaagagataatatgtcggagtatgatatgatttttgtaggattcccaatttggcttgcgtaccacaatttgatacaatgcacccttggtcaccagagggtgcatttttaacgatagcccctattcaaaaaacgatagggtgcatttggaagaggaatggaatatttcaaactcgtatgttatactggatgctgaaaaaaaaacatgaattggagggagaacaatggaatttaagttgatttccatagcagtcttaattgccttctacggctgctattttgtaaaaatgcttcgtcaaaaaagcagggaatacagacagaccaaattggaaaggacaaagtcggttttgtgaaattcgtggaagttacaatgagggttgctgctgttcttgttttcgcagcggatcttatcagtattttcattgggataagccatagccctgttgctgttcggattattggtgcggtgatgagcattgcgggaacaattatatttattgtcgcagtacagactatgcgaaatagttggcgggcgggagtttccacaaccgataaaacagaacttgtgacaaatggtatttatcaaattagccgcaaccccgcctttttaggatttgacctcttatatattggtacattattgatgttttttaactggattttgtgtattctaaccgtttttgccgtcatcatgtttcatttgcagattgtcaatgtagaagaggatttcctgcttgccacatttggaaatgagtatctgcaatataagaaaaaagtctgccgctatattggcagaaaacgataacttaacaatttatcgggcggtactacatatcatcaaagagccagggatacctgactaagtgagcacagaatgtcgggtgtaaattctgcctgttgatatacttatagtacagtgagcgaagggagtgagaaggatgcaaggctggatcgaaggatttcaggaatccatagatttcatggagcagaatctgacggaagaactggacatagaagatatcgccgctaaggcagctttgtcttcgttctattatcagcgcatcttcggggctttgtgtggcatgactgtcggtgaatacattcgagcacgcaggatgacgctggcggcacaggagcttaacgggaaggatgtaaaggtgattgatgttgccgccaaatacggctatgaatcgccggatagttttgcaaaagcctttcagaaatttcatgggattacgccgtcacaagcgaagaaaccgggggcatcgctgagatcttttgctccgctgcatatcaaaatcacgatggagggtggaactatgttggattatcgtattgttgaaaaagcaccgtttactattgtcggagtgaaaaggcctttcaattcggatacaagctatcaggaaataccgaagttctgggatgaatggctggctcaagacggaaagcgttcagtaatgggaacctttggcgtttgccttgatatgaagggaaaggattttgattactggattgcggatctgtatttcccctgggaggatatcccggaaggttgtgagaccagagtgatccctggcagcgcctgggcacaattcccgtgcacgatgaaaacacttcaggatacgaacaccaagatttggtcagagtggttgcctgcacttaaaggatactctcttgcaggagaatatgatatcgaagtatattttcctccagaggagggatcagatgatatgaaggtgtatatctggataccgcttaagaaagattgaacaagtcaataggaggtctctcatccggtggggatagacgatcagcaatgccagaaatcccaggataaatcggaagaagagaatttctaccggttcaaaatccactaacagcactttggtgtagatgaagatagttccccgtatcaggattgttaccagcgccgccaggtgcccgcttgcttttttactcatccggtgtttcctccttcttaaaaaatatgtcacgataaaggcccggagccaatccgataaatcggttgaaatagttcgtgaaatgactttggtcggaaaagccgggaagttcccttctcccggttacttcctctgccaggttcagcatgacttctttggtaatgttaaatccccggtaatctaacgtgccattatcactttgcacacaggcatgattatctccgggattgaaaagaacgatatcgcctttttctatggtatattcctgatttctacaggacagtatgcgctgtccgttctctacgaaaccaattacataatattcatgaaagtggtttggaaatggctgcacgattccctcaaaacggtatgcctcaatccgaaattcatcatcataaaccaacgtccttgtttctttcttcatgtgtgttccctccttgctgtccttcattgtagtatttcaaaatccaaaaggattgcaaaatatcttctttttttatggcttactggattgatgtctttggatatggtatgctgtaagcaatcaaatggcggaggtgcgggtatggaagaacagcagaatccattgacttatgaaatcattaaagcggctgttgccggagagaaatgggcaacggaaaaggtcattgcacactacgattcttatattgaggaactcgccacggtaaaagaaaggcagccagatggcagcgtgagaacctatgtggacgaggatatgaaacaatctatgattctgaacctgctggtgaagacaccagactttcctttgaaagaagcggagaggatagcgggagaggagtaaaatttgtgtgtttcttggacgaacggttcatactcatggaaaaataaaagggtgggtaaacttcagaaaaagagcctccacctttttgtataactaagaaggtatctcccgaaacatgatatacataaaaaattacttcagggcattttggggtatgttgcttgtaagttaacttttttacaagatgtcaaaaacaactccattgttttctgtgattcctttttttataatatgattcaggaggtgagaatattgagagaaataaatctcggacgggttctgattgagaaccgtcataaacggggaattacacaggatgaattagccgcatatatgggagtttctaaagcggctgtttcaaaatgggagacaggcagcacttatcctgatatagctgttcttccgcaactggcaatgttttttaatatcagtattgatgaattaatggggtatgagcctcaaatggccaaagaagaaattcgtaaattgtaccaacagttgtctttagattttgcttcagaacctttccatgaggtagtagggcattgcagggaaattgtgaaaaaatattattcctgttttcctttgctgtatcaaatcggttcattatatgtaaatcaccgtatgcttacgccgagcccagatgaagcggaaggacttttggaagaagctatttggctatttaagcgtgttaaggcagaaacagatgatgttgatctggcaaaacaggctctgaatatggaagcactttgtctgttgtccttaaatcgtccgggggacgttctggatttggtaggggagccggatttttctatgacttcgacagaacctcttcttgcttctgcttatcaattactgggaaacagaaaagaagcaaagagcattttgcagataggagtttatcagcatattgttgtgctgatgaatctgatgtctatataccttggtttgtgtttggataatgagggcagttttgaagaaacatatcagcgcgccagcttgattgtagaaacgttccatgttgaaaagctgcatccgagtattgttctgagtttttatatttcttctgcaaagggatatatgcgattgggaaacagggaaaaggctctggatgtgctgaagcggtatacagatcttgccaccagtgatatttatccgttgcgattgatgggggatcagtattttaatctggtggacggatggctggaagatacgctggtgactggaaatgatttgcctcggaataatacaataatccgcagcagcatatcgaaggcagttgaaaatggcaaagaatttctgcctcttgtggagaatacccgttttcaaaatatggttaaaaggctaaagaccattgagaaagaggaggataatttgcattaaaaatatattttgtttaggaaaggaactttagctatgatccgcaaatttttaaaaagtatacttggtgagaatttaacagaaaataatgaaaaactggcaacgattaacttcggtatcattttactaatgtttgtgatctctggcgtcatgttttttttcctgccagatcagattcccattttgcataatggggttacagattatccaatacccagtgtattaggggtgtggttatttccgttgattgcattgattataaatattacatttattaagcagaataggctatctaaaatgaacagtgcgatttttggaatactcttgatggttatgttgatgttttatttttctgtaatgtgagttttgatgtttatgaattgcgttttatataaaatcctgttaagaaataaaagctccgctattgtgtggatttcttatatgattgttggaggctatgcggggtatttgctctggtatttattgtccaggtatgtttcagaatcagtatccgactgccggaggctggtttttctactggtgctatggttatgcatgattgttgcaatatatcggatcccggaccaactatgcacgaaccggtgtattaaaaatgttttatgctatccgattccatataatgttattgtatccgccataatgctacggatcgctgttatacagtttggaatttgtataatggcttttggaccgcaatttcttttttctttcaaaaagggtgaagcagctttttttacagatatttccagttgtttactaatttgtataggggatgttattatctcccttatttctatcataatcagccggttttctcctgctggtgcggtggggtatgcgtttattgtctttcagtacggttcacttttcgtgcttgttttactggcgagcagaacaattggggtcatactatttccatccgctattttttcatggatgagtgaaatctggaaacctgaaaaatatttattttggatgctgctgattttctttatactgatgatatgtttgggtatggctgtaaaatattggtatatcaggggatatctgaatatccagaattttcagcacagatcagcaaataaagagataaagccgacgcaaattaaaaatccttattggttgcttgaatggaaaagagtaacaagaaacaagatactgatttccttttccaacatcaaaaatctattgacgattgtggttttgagtaagttgctttttcggaactttggtcagtttggattgggtggtatgtatgtaatggagatgatactgctggtatctggatgtgcagttaatacgatatccagtaccgcatattctggtgatgttaataggttttactatgtttttttaccgatatcggaacgaaaaatatttctttggaaaacgatacaagggtttttctttggggagatcacagttctatttttctggataggtatcctattcttcagaaatgtaccagttgccgatgcctggctgcttttcatttatggtagccttatgaattatacctgttcctggatgggagtttttcttgattataaagcaccccggatgacaaatagtacaaatgaactgctacatggaaatatcagtaagattatggttctgcttgtttcgatagcattatcagttgtagagatttatcttacagatgaacaaatcatttccattccattacttccgtttgcagttattataagtatctgtatggttatgattgaggttatctactgtacgttaggtaaagaggtgtttcatgattaaaataaatggacttacaaaaaaaaatggtaataaaactatatttgaaaatgtatctggcttattgaaaaatagaaatatttatgcgttggttgggataaatgggataggaaaatctacgatgcttaacgctattactcagccagccagcatggatggaggaaccgtggagatagatggaattaacagtaagctgttccgggccagacagaattttttctacgttccggacagtaaagaaatgttcctgaacctgacagggtatgaatatttgaggtttgttacaagactgtatcaccgtaagatagaagaaatgggagagaagctgcaggagatatcgacagccttcaaactggatcattcgttaaatgagtatattggaaattattctttagggatgaagcagaaagtttatctaattgcagcgtttcttactggcacgggaaatttaattttagatgagccctttaatggtctagatccagaaagtattattgttttaaaaaaacttttgacagattacagggataaaggaaacttaattttattttcaagccataatcttgatcttgttgcaaatttttgtgacagtattgtttttattgataaagaacaaaaaatatttctctgcaaaaatccaaaagattatgagcagcttgaggctgtattttttgaaaaatgtgtttaatttaagtagtggaagttttaaaaagtggtgaaattatagaggatttacagtggagattttgctgtcagtcaatatgagcataaaatgtacaacaaaataaggaaagaataagttgcttagtaaggagggcatcaatgtcaatacaaatgaatttaaaacggcagcccgtcatccagcgtgggaatcttaccattgatccacagtgctgtacagttacgttagccggagaggaaattggcctttatcccaaggaatttgatgtcctttgcctattgacacagtatcctggttgggtgctttctcctgaacagatttatggagccatttggaaggaaaacgagattggatgtgagcgtgtggtctataatgtgatttgccagcttagaaggaaactgaagaatccggatatgattcagacggtgattaggcgtgggtataaatttgtgggatagagcaatcccttggagcagtacaaagataaactgttctgggggattttatgcatatgagcagtctggaaagcggatcagaagcattgcgcggcggtggtgaatgtgatgtgctcgatcagacggaaggttggagatgcgtgcatagaaacggtcattgggagcgggtatcggtttgttggatagaggaagcccggagtacagtgtggaaaatccccagtattccgggtttgcgtcttatcatcattaatttctcatcctgcttgttccagaagttatcaatatagacttataatagacccataaagttatctttcatgacaacgaataataagaaatctatggtaacatcctacgcgtagtggtaaattgctctacaggaaagggtgagaagcatggaaaatgaagtatacgaaaaagactatggagaggaattccgggaacggagcgataagtcagagggaaaggactttctggacaccttgatggatattggattctttcagaagtaccaggaagaaatgaataaaataccaaagcgcgtggttcccaaagaaaaagcagattatgaatatctgcttggcgagtgtgatgcgtatgtgaggcagttcgggggaagaatccggggtgaggtagactatcagaaatggcaggctaccattgatctgtacctggagcattttgagttctgtgataaggagactctgacgctgctaaaggagatctcagagcgggcggagaatgtgacgttttcgatgaaagaggagttgattcggatgtcggtgtttattgggtattttgatgaggtgtattaaaaataggctgctggcacatgagaaatgtttcatgtatcagcagctttttttctatcgcagcaatggcatactgcctgtgagcttattgacctttttcttggggccgcagatggcaagaccgaagtattgcagagtgctatctgacacgttctccatttttgaaataaattcatcataggttttacagctctgtgccagatcggaaaagtcaaccacggtcaaatcccgaaagtcgggttgatagagcttctcacggattgctttgatgagttccggtgagccttttaagattggtacgggaaattcaatgatgccgagatgctcgtttcccctctggtctgtgacattcgcgccgaccacctccggcatctcttttcccagtgtgattcccatgatagccgctgtatttgcgataatcccaagtggcagattttcgtcaatgaccatgacgcatttttcattctgtaaatccatttcagattgtctcctttttttgtgtttttcctctgtattcagaaataaacagtccgatcagtgccaggaccgtaccaatgccggacatcacggttactttttcgttcaggataagagcggatgtaacaaccgtgatgaccggaactaagtaaatgtaaatgcttgttttgacagcgcccagaaccttcacagccatgttccaggtaacgaaacagagtgcggatgcgcccaggccctaagaagatcagattccccaggcagactggacttgcgaaccgttctgctccaatgcggcagtcaaacaggaatagtgcgggtaccataaacaggatcccataagcaaatacccgccttgtagtttggatggtgtgatatccaaaactgctgatttcccgtgtcaacacagagtagcaggcccatacgactgccgcagctatggccaacaagtcaccgatgggatttaactgcatcttcgctccgttgaaactgatcaggcagatgccgaccattgcgactacaaatccgatgaagaaatttgcacgcagcttttcttcctttgtgaacagatgggtgagcattgctgtgaaaaagggtgctatggaaataatcacacctacgttggaagccattgtataagtcagggcaatattctccagcagataatacaggcacacgccgcacagtcccgccgctgcaaagacaacttcctgccgtttggtagtgcctctcatccggtggggatagacgatcagcaatgccagaaatcccaggataaaccggaagaacaggatttctatcggttcaaaatccactaacagcactttggtggagatgaaggtagttccccatatcaggatcgttaccagcgctgccagatgcccggttgcttttttattcatttggcgtttcctccttctctaaaaatatgtcacggtaaaggcccggagccaatccgataaatcggttgaaatagttcgtgaaatgactctggtcggaaaagcctgtctgcaaggctgcctctatcggaggtacaccctgttccagaagtttctttgctttgccaatgcgtatgttctctaagtagctgtatggagtgacacccttggacttggtaaagacccggagcagtgtagatttgctaagaccagcatagcgacagatctgatctaaataaatccggtctgcgaagtgctgctccataaaatcgcaggctttttcaatttcctcccggcattccgggatacagctgggggagggctgcccatatcgttgaatcaacagagatataaggagcagcaggttttcttccttaccgaactcacaggagcctttcatgaccagttcgtggagcgggtgcagatagcaggtcacttcttcatcgaagattacggttttggaaaagccggggagttcctttctcccggttacttcttctgccagatccagcatgacttctttggtaatgttaaatccccggtaatccagcgtgccatcatcgctctggacacaggcatgattgtctccgggattgaaaagaacaatatcaccttttgctatggtgtattcctgattgcggcaggacagtacacgctgtccatcctcgataaatccaattacataatattcatggaagtggtttggaaatggctgcacgattccctcaaaacggtatgcctcaatccgaagctcatcatcataaaccactgtccttgtttctttcttcatgtgtgcttcctccttgctgtccttcattgtagcatttcaaaatgcaaaaggtttgtaaaacatcttcatttttcatggctcactggattgctggctttggatatggtatgctgtaagcggtatatcaacctgattatatgacagagcttgccacagtgaaagaaaggcagctaatacaatattaggttttgaaagaaacagaaaacccttatacgaacacggaaattgcctatgagttttcgtgataatacagtaggtttgcgtgatagtatacagaaaaatgataaaagcagaatggaatattgatgaaacgagaaaaatgggctgcgcaggctcttttattttacaagctggtatgttataatatattttatatgtgaaaacagatgcaaggaggaatcatggagcaggtttcattaaagataggagagcggctgaaagaaatccgcaacacaaggcagctcacgctggatgatgttgcagagctgactggcgtgagtaagcccatgttaggacaaatcgagcgtggccagtcctcgcccactatcaacatattatggaagatttcaacaggactgaaaataccactatcttttttctgtaaacaggaggaagcggagtacacggtggccgggcttgacgagaagaatgtgatcacggaagaagacggaggaatgagagcatacccgttgtttccttttgacccggtaaggaatgtggaggcgttttatattgaatttgacgcaggggtgtgccatgcttcactccctcatgtaacaggcgtggaggaatatgtttttttggtgcatggggcgctgaaaatggtgataggcgggaaggaagtactgctgcaggaaaaacagtccatacggttcggggcggacatttcccatgcataccataatgcttcggataaagcctgcgccgcttataatgtgatattttacccgaacaactaaaggaggagacagaaaatgtatgaattggtacaagtcagtgagaaatgctattacataaactgcccggcaaagatcggcatttacgttgcggacaaggatcatgtctatctggttgacagcgggaatgataaggatgcggggaggaaggtcaggcagatactggaaaagaatggctggcatctgactgccattctgaatacccattccaacgcagaccatatcggcgggaacaaatacctgcaggggcagacaggatgtaaggtttattccggtggcatagaggcggcattcacaaaatacccggtcttggagccgtcctttctttgcggcggctatccgtgtaaggatttgcggcacaaattcctgatggcgcaggagagcaatgtggcggatttttcagataaaaattttccgaatgagatcgaggtgataccattgccggggcatttctttgacatggtgggattccgtatgccggatggtgtggtattccttgcggactgcatcagcagcagggagacattggataagtatgctgtttccttcatttatgatgtgggtgcatatctggaaacgctggatatggtggaaaagatggagggcgctatatttgttcccgcccatgcagaggcgtctgccgatataaaggaacttgtccgctataacagggataaggtacatgaggtggcggacaagattttatccatttgcggggagccaatatgctttgagtgtattttgcaggaattgttcaatggttatgggctggccatgaactttgaacagtatgtgctggtaggcagtacagtgcgctcctatctttcgtggctgaaagataacgggaagatagcggttgaatttcaggataatatgttgctctggcagagggtatagtggggacggaatatacctgccttttgtaactacatttccgaaattcttccgaaatcattccgcagtattgcaaatgggcaatttaagcggtatgattaccaaaacaactgaataatgatatatcttcagggcagggtgagattcccgattggcggtaaagtccgcgagcgcgaaggcgcaggacttggcagatgtccaagtcaggatttggtgtgattccaaaaccaacagtatagtctggatagaagaagatgaaattacattatgcggtatgctgctgtttccatactgccgtatgatgttgtttggtattccaggcacctgaatgatatatagattcaggtgctaatttttattttcaggaggaaatggtatatggacagcaagacaaaaaagataactactaccgccatgctttgtgcagcagcctatgtagtggtggtggttggacggattcccgtcgtgctatttttgaagtatgatcccaaagatattattattacgctgggcggcttgatatggggaccgatgacttcttttatcgtatctgtgattgtgtcattgattgaaatggtgacaatcagcgaaaatggaattttagggtgcattatgaatatgatatcaacctgttcctttgcctgtaccgcttctgttatatataaaaagaaaagaacattatcaggtgcagtcacaggattggtaacgggcagcctggtgatggtattagtaatgctgctatggaattacctgataacaccgatttatatggggtatccacgtgaggctgtagcagaactgctggttcctgcgtttctgccatttaatctgttaaaggcagggctgaacgcaggatttacatttcttctttataaaccgataacaacggcattacgcaaagcagggtatatttcagattctcaaaatgtgctgagcagaaaaccgattggtttgtggctgttttcaggagttcttgtgatcacctgtatcctgctgatattatcattcaacggaatcatatgaggagcagttatggaacagatttcagagaggaaacccttacatattatttcgggcaatgtgatacatggacgggggattggtaaactggtcagtatgccgactgcgaatatggagatatcagatcaaagcgccctgccgccagtcggtgtatatattactgagattttgctggacggtcaggtgtattacggtatcacgaatatcgggagaaggccaactgttgacaatgacagggaaatatctgttgagacacatattttaaactttaacaaggaaatctatgggaaaagcataaggatacagctttttagcaggctgcgatcccagaagaggtttgagaacttttccctgctgttggaacagatatggacggactgcattgcagcacgaaagttttttggcatagggcagaccgtttcacggttgtacatgagtgccgcaaaacgtcaggttataattggtggcaatgaggtttatttgtcggtaaaggaatttgatattttatatatgctgtatgctaatccagatgttgcctatacgaaagaacagatttatgaagctgtctggcatgaaccatcaaatggctactgccatgctgtggaaaatacgattttccaaataagaaaaaggatcagagattattcgccaggacatgattttattaagacggtcattggatttggctacaaattcaatgcagggtaagaataatcgacattaaatcgaaacctgttcgtctatttaaggcagaataaaagcctgtactcgcaacgcctgtttgattatggcattgcagcgcaggctctttttacgattcagcttacattaaatgtgtttcgctccattccttcatctgttccaaaatagggacaaaactctcagccaattctgtaagggtatattccactttgggtggtatttcctgatatatccggcggttgatccagccgtcattttccagttctctaagctgctttgtcagtgttgattttgtgatttcatccccgattcttctttgcaattctccaaatctctggactttatatactgcgatgtaccatacgattaaaattttccatttgccgccaagaatggattgtagtgtcgtcatcgggacgcagcttgccataaggctccggctgcgggaaaatttgttatcagccatacgaaagacctcctttgtacggtgaaaattatacggtattttcctccgaatatcaagatagtgtcttttttcataccggtatttcaaaagataccaggtgtcaaaaaacggtccaggacaacaaaaagacagtacttgtaggattgtttttttcgatttagactatgcttgaacggaggcgaaagagatgaaacagaatattcagatcttccttttaggtatccagaatgccggaagtgaaccagaagcaattctgacaaagacagccggagactattgttttgaaaatgggttccacaaaatcctttactgtgaactggatgaaagtggaaccgctacagacaatctcctttttctttcagaaacagaaatgcggctgagtaaaagcggttctgttgccggacaatttttatttattccaggcgaaaagacagtggccgattacctcacaccctttgggaagattgcttttgaggctgaaacggaaacttattacttggataggaaagaggatgagctgaatgtacagatgaaatataagctctacgcagacaatcagttgttctcagaaaatactctgactatccacgtctgtaatgcggatttagtcagcggataaggcaaggagggatcattttatgaagaaattgtttacttctgaatctgtaacagaaggccatccggataaattgtgcgaccaaatagcggacgctgttctggatgcaattatacgaaaaaagcctgatgcaagagtggcctgcgaggtatttgccacaacaggggttgtctttattatgggtgaagtatcagacggtgggatgaatggaattgacattgaaacgattgcccgtgatacgatccgtgagatcggatacagcggccatcgctttggatttgatgcggatactgtggcagtgatcacagccattcatgggcagtccccggacatagcacagggcgttaccagggcgctagaagtcagaggaggcaaaaaaagggaacttggagccggagatcagggaatggtattcggatatgcttcggatgaaacggaggaactgatgccaatgccgatttatctggcccatgcattgacaaagaaacttgctctggtaagaaagaatggatctattccatatcttggaccggatgggaaggcgcaggtgtcggttgaatatgaagatgataagcccgtgcgggtggacacggtggtcatttccacacagcacctgccggaaattgaccatgctacgattgaaaaagatatgatcggacaggtcattcgggaggttatcccggaacagcttatggatgaaaatactaaatatctgatcaatcctaccggacgttttgtgattggcgggccgcagggagacaccggcttgacaggaaggaaaatcgtggtagacacttatggcggatttgccagacatggcggcggtgctttttcaggaaaggacccgacgaaggttgaccgcagcgccgcatatgctgcccggtatgtggcaaagaacctggttgcagccggaattgcccaccggtgtgaaatccagattgcgtatgccattggtgttgcacggcctgtttccgtttcggtaaatacctttggaacgggaacaatttcagatgagaaggttttggaactgatcgatacttattttgacctgcgcccatcttccatcatcaatggcttagggctcaggaaaccaatttacaggcaaacggctgcttatggtcactttggccggaaagatctgcagctgccatgggaatggacagataaagtgacagtgcttcgcaatgcattagcaaaaacagaggatggaaaggagaaatgatctatgcattacacaggaacgatttggagaccgccttatgaggcttatagtgcgctggttcaggtgacggctggctgcacccaccataaatgcaaattctgtactctttatgaggatgtaccgtttaaattccgtatgtcccctttatcagaggtggaagaggatctgaaagagatcagccgctattaccggaatgcgaaacgtgtattttttaccggggcaaacccgtttgtcctgagttttgataaactgaaaactctggcagggctggtcagaaaatattatccaaaggcagagtccattggctgtttcgcccgcattaccgatattacgcctaagacggatgagcagctgaaggaactgcaccggctggggtataacagcattacgattggtgtggaagccggagatgatgaagcgctgtcttttatgcataagggttttggtacaaaggaaattattcgtgaatgcaaacggctggatgaggctgggatggaatataactttttctaccttgccggaatttatggccgcggacgtggagaaatcggtgcaaagaatacggcggcagttttcaaccagctgaatcctaagattattattaactctatgatgacgatctaccgtacttctgaactctatcaggagattcagaacggcaactggaaagaagaaacagaaatcgaaaagcttatggagctgaaagtgctgattggcaatctgaatatcgatacctattttgcaacgatgggtgcatcgaattgtgtcaatgtggaaggacatttgccaaaggataaaatgaggatgataaaatggctggatgaagtgatcgattccgtggacgaaaaagagcttagaaggtatcgtgaaaatctgcggcatctgtaatgggaggactggacaatgatacaggatattttcccttaccgtttagacaatacatttcataatgcagcacctgtatcaagtgatttttttttctctttccagggagaaaaggtgctcctgcaaatccggaaagatggaggctgtgcgcttcctgcctttcgggacttgcagtgtcctatgagtgaagtaagtgatgggacggtatatctattttctgtggatggggtgccggtttatctgatccggcaacaggatacagcattgctggatgggcagtgcttacactatgtccctattcagagtttagaaggcattttccctgagtgggcatattttgccggtattacagcactgcatctgggacactggtatgaaaggaatgtttattgcggcaagtgcggagatgtgatggagaaggatgcgaaacagagagcactggtctgcaggaaatgtggaaacacggtttatcctgccattgccccggtggtgatggtggcagtaacaaatggagataagctgctgatgacaaagtatgctgaccgtcccctttcccaatgggttctcatatccggctttgtggaaatcggagagacattggaggaagcagcaaaaagagaggtttttgaggaaacgggtatccgcattaaggatttgaaatattttggaagccagccatggggattttctgattccattattgtgggttatactgccaaactggacggatcggataaaattcatcttgataccagggaacttgcaatggcagcatggcattcccgtaccgatttaccaaaagagctgacggacatcagtataacccatgagatgatagaagccctgcgtattggcgggaaaggaggacaggtatgagtacatattgcactgcagcggtgataaaccacgaagaaatcataccgggagtatggaagatagagctgtcggcaccggagatcgcaaaaacggcaagaccgggacaatttattcagttatatccaccggatgagaggaatctgctggcacgtcccctcagcctgtcctccatatctaaagagagcgtgactgtggtatatcgggttgtgggacaagggacaaagcagttttcatgcctgcaggtggatgatatggtccgtgttatgggaccgttgggaaatggtttcacgcttccggatgcaggaacacaaaatgtgattgttggcggcggcctgggtatcccgcctcttttggaacttgcaaaaaggtttcatgaaaatacagtagtattgcttggatatcgggatgatccgtttatggcagaagattttcaaagattaggtctggaggtccatattgcaagccaatcaggaaactacggttttcacggaaccgtgttggatttgctggagaatcttactcttccggcgggaatgatatttgcctgtggaccgcgccagatgctgcaatctgtttcgatgtgggcaaaagggcataacgtccccattcaggtatccttagaggaacggatggcctgcggccttggtgcctgtcttggatgtggagtgaaaatacaaaagcccggagagcaggactggagatacctcagggtatgcaaagacggccctgttttttcaggggaggaggtagtttggaatgaatagcggaatggaaacaaccatcgcaggcgtgacatggaaaaatccggtgacaacagcatccggtacatttggttctggccgtgaatatggagaattgattgacttaaatcgtttaggggcgatcacagtaaagggagtttctgaggaagcgtggaaagggaatcctgttcccaggcttgcagaaacacaaagcggtcttttaaattctattggcctgcagaatgcaggagcaaagcattttatagaaaatgatattccgtttctcaggcagtatgatacaaagattattgtcaatatctgtgggcataccttatcacagtattgtgcagtggcagaaaggtttgcaggttgtgacattgatatgttggaactcaatatctcctgtccgaatgtggaggaaggcggtttgagttttgggacagatcctcatgttgtagaaagagtggtgaaggctgtgcgacattatgtaaaacaacctttgatcgtaaaattatcgccggaagtcactgatataacggaagttgccagagctgctgtttctggcggggctgatgccctttccttaattaacaccctaagagggatgaagatagatattcataagcgcaggcctatccttgccagtaagataggcggttattccggcccgggtattatgccggtggccctgcggatggtttatgaggtctgccatagcgttgatgtgccggttattggaatgggcggtatttcgacatttgaagatgcccttcaatttattatggcaggcgcacaggcggttgctgtcgggaccgcaaatttccataatccatatgcgacagtggaaatcatagatgggatcaggaaatacatgaaggaaaacaggatttcttctctggaggaaatcagaggatgtattgattgaggatagatttacggaacgataaaagaagtgatggtgtccaggctgattttgggtgttctgataaaacggtggttgaaaacggggacagatttgtagtgtgaaaaataagtgtgccgatggcaataggcgtttactgctgctgtcggcactttaaattctattgacaaatttgtgcttatagtatatagtgtgtatatataaacagcacaataaaaaggagaggaatataatcttgtgaagatactgatatcaaacacttccgatagtccactttatcagcaaattaaagaccaaatcaaagatgcgattctgaaagaagaattggttgagggcgattcgcttccatctattcgcgcttttgccaacgacttgaaggttagcgtgttgacgatacggcgggtttatgaagaactggaacaagaaggatttgtcacaagtcaggtgggcaaaggtacctttgtgtcaacaagcaatatcgatttgttacgggattccaaacgccgccttgtggaacagaaaatgcaggatatgatacagaccgcaaaatcgcttaatattagcaaagaggaactaaatgctatgatggacattttatacgaggaggattgaaatggatttggttttgaatgtttcaggtttgaataaatcgtatggtgatttttctttaagggatgtcacattttccattccagaagggtgcattacgggattgattggcattaatggtgcaggaaagacaacaacactgcgcacaatattaggacttacaagtcgagaatccggccacattcagttttttggtatggatatagaaaagcaggagcagcaaatcaaggaccgcatcggcattgttttagatgatgggtgtttttatgatgaattgagcctgaatgaaatgaaaaatgtgattgctccagcttatacatcgtggtgtgaacaggatttcaaatactatttggagcaattttctctaaatccaaagcaaaaaattaacaccctttccaaaggtatgaaaatgaaatatgctttggcattagccctttcgcacaaagcagaactgctgataatggacgaaccgaccagcggcctcgatcccctgattcgcagccagcttttaaagatactaactgactatatggacaatggtggtaaaggcgtatttttttctactcatattacatctgatttggataagattgcagatatgcttatcatgattgacaatggacgcatcgtatttcaggaggaaaaagattctctgctggatagttaccgcattgtgaaaggggatatgcggagtcttaatacagatacccgcaaactctttgtaagcacttctgaaacaacatttggtttcacaggaattacgaaacaaatttcggaagtacagaaacgtattccagacataattatagaacgtcctacgattgaggacattatgttaggcagcatcgaaggagggaaaaatgatgttaatccatttggttaaaagggacttcctaatcgtgaaaaagtatgttttgctcatgtttgtggtttgtgttatcataccaccttttatggtatggcgtgttcctgaatacgctgggcctatgagctttgttttgtctgctatctttgctatttttatgcttttgcagtatgtttccctgaaagaataccaatacccgagagcatccaccatgctatgcactacaccatatccccgcaagttgcttgttttatccaaatatgttttttgtctggtaaattatgctgtttgctgtgtgattttctggatagaaacttttatctttgcggaattgggaggttttcattttgagatgccgatactcatgtttcttgtgctggcagtctttcttggggtttatcttcctgtacagtacaaattgggatatgaaaaaacaaaatttgcctttgtggttatcattatggcctctccctttgtttttccacaactgcttaaaatggaggacggtataaatctggattttctcaacgcattgcctcctgcgctcctatatggcggaattatcctgatcggccttatgatactgattgcatcggcctgtgtatctgtggaattttataagaaaacagatttggaataagactggaggtaaaatcaattgactggcgatattatttttctttatcttatagcagtggtttcccttgtgttcgccatttttaatggtatctgttttttaataaagcgtaataagacggttcagacggtaggaacgattatctctattacatcaccaaatccagagatagcgaaagcgcgcaattcaaaatgggcgaaagttagctataaggtagatggaagaaactttacttccaaaaatcgtgtacaggttcctatgacggcagaaatcggtagttcggttacaatacgttatgatgttgaacaaccggataagctatatagtttttcactgttgagaattttgatcgcactgtgtatcactgttatttgcatcattgcagcagtgttaatctgatataagaagggggagataggatgcactttccacaatggtttgttttcatctgtattttgcttccggtaggtaatgccatttacaaagcgtggaaaaataatcgcaagaaataagtgagcagtttactggaacaaaatagatatgagaaaattgggcggtttggctgtaaccattatgatccttaccaggacggcagtattccacgatttagagacaaaaaaacaatgtggttttaagatcagactgagttcacaaacatttcacacatttattagcactcatacttgacgagtgctaataaatgtgttacaacacagatagaacaaaggaggaggaaagaaaggaactagaagaaggtttcattttcttcccaatcatccccagttccggttaacaagtagtttttaatttggaaaaggagcgatgacttatgatgacacctagtatttttggagaaaacttatttgacgatttctttgatgactttttcgattttccgtcgtttgacgataaagcgatgcgcaaagcagagcggaagctgtacggacgccatgcggcgaatatgatgaagaccgatgtgcaggagcatgacgaccactatgaagtggatattgacctgcctggctttaagaaagacgaactttccctggaactgaaagacggctatctgatgattaatgcagcgaagggacttgacaaggatgagaaggaaaagaaaacaggcagatttgtccgcagggagcgttatgcaggaagcatgagcagatccttctatgtcggcgaagatgtaaaacaggaagatatccacgcaaagtatgagagcggggtattgaaactgagcattccgaaggcggagacaagaaagccggaggttgaagaaaagaaatatattgccatcgagggataacggcacctcttaatataaaacataacaggatagcccggagttcggcgcggtgtggaaaccgtccggttccgggctttttctgttttgtggtaggaaaagaggcagacgtgtggtagaataatggcaagctgggaggtgagagtagataatgcgcgatgacttagaacgttttttgatcgcacaacagacttattaccggactgccctgcaggagataaaaaacgggcggaagcgtagccattggatgtggtttatttttcctcagatagtagggcttggtcacagtgagactgcccggtattatgccattaagaatatggaagaagcaaaagcatatatggaagattatacacttagcagcaatctcatagagatatcggaggcactgttgcaaataaagtctaatgatgcacttgaggtgatgggctggccggataatctgaaactgaaatcctccatgactttgttttcactggcaaaaccggaatgtgaagtatttcagaaggtgctggacaagttcttccggggagagcgggatcagaaaactgtggaaatcctattagggaaaagatgaaacaatcggtatgcatcagaaaaaggtggactttaagacttttggtatctgaggataaaggtgcaatgaacccggaaaacaaagagaaaattgaaattaaggaatgcgaatgtatgaatatagtagataaaaatatagatggtggaaaagcatttgactggggtaaaacttccgcagattatgcaaagttccgtgatatttatccacaggaattttacgataaaattataaaacgtgaattatgtataaaaggtcaaagtgttctcgatgttggaacaggaaccggagtgcttccaaggaatatgtaccgttatggtgcaaaatggatagggacagatatttctgtgaatcagattgaacaggcaaaaattctttcaaagggtttggatattgagtattatccattatctgcagaagatgtatattttccggataattcatttgatgttatcactgcatgtcagtgtttttggtattttaatcaccaacagatcagtgataagttttttcatatgctgaaaccggatgggcgtattcttgcattatatatggcatggctgccttttgaggacaagattgcaggagaaagtgagaaacttgttctgaaatacagccccgaatggagtggttcaggagaaacgattcatccaatatttatacctgactgctacaaagaaaaatttgaacttgttcatcatgaggaatatccgttggaggtgcatttcacacgtgagagctggaatggcagaatgaaagcctgccggggtattggtgcttctcttacaaaacaggaagtttctgcatgggaacaggagcatacaaaattacttgctgaaattgctcctgtggagtttaatgtcttacattacggtgccattgctgaactgaaagtgaaaaaatgattttcaagggactgataaagtgattgaaactgtgtcctggaaaggaatggatcagacaacgatagagataaaaaatatatgctgaggaggtttgtgtatgaaaagaagagcaagtttaacaatattggtaattgtgttaatgctgtctttatctgcatgtggcggaaaaacaaaagaattatacgaaattccagatttatcacaatacaaaacagaatatgttggggatgctcaaaatgtcgtaaacattgtcagccaacaagattatccaaagggatattgttatgatagtatagcgatacagtctgaaacagagccatatggattaacagtttttctaaaagaagaaccatcggcatctaaaattgaagatgaattacagatcaatgcagatacgacatttgatttgattggtaatttaggaactcttgagtacagagaagctgatagcaaagaacttattgcagcctatgagcgttagggtagtgggattgggcagtgttttttgaccggaggaaatatcagaaagtatttgaaattgatgaagagtaaataaatgagctagggccagaatggtattgaaatcattgaccttagctcattacatgtggaactcactataaatcatgctcctcttgtcggtgttcagaaatatccctaaaatgtacgtcgttggatagcaagattttgaaattggctataatagtatttagtgtagaacgtcgtttttctaaatcttgtttttctttttttgctgaagaacattcgtttttaagattatcaatttttttctgttgccgttctggggaaggtaatttgtttactcccagatcctgcaattgctgttttaaagtattgtgcagtttatattctgcctgatgtttggatttgtatttctcgggattaggtgctttttcgccgtcttttacgatttttctgcaggtacggtaggatgaacaatgcttctgaataagttcctgatgggatatttcggagcttaattcagaaattcgctgttctgtagcaataatagaattatcaatatctacaatatgctgttgaaagtcttcgtaattcagcaaattgttttctgatagatagttgaaggttctggctgcttctttcagattattgagttgtgcccaccgttcaaatccggcacgattgccggtacttacataagatgagatattgataaaaagccgtacttctctggagacgttacgtggagattttgttttatgccggtttttctcaaggcggagtaatacattttcttctgtgtaatagctacccagagatttcatatttgtaaagtttttttgctccggtgcccggaaagccaggttctttccctgacggatctcatatccggcaagcttcattttttgaagaaactcatcatagttgatggatgaccagatcgctttatctacagcgacttttaactttgctttccagctgtttccacgatggtattccatattttctttataagattttcctttttcgccggttggcatactggtgacaagaccgttttcctgacaaatacggttactgatccggcagattttatgatagctgcgtttgttggagacatatttatgatggtcaacaaagctggtagcattaaaaatgatatggttatgaatatggtcctggtcaacgtgggtactgatgacatattcatatttcacttttagtacttcgtcagcaaattctttgccgagcttatgtgcggtttcagcgtcaatctctccaggcttaaaagattgaattaaatgaaatgccagattgttgcctttgtccattacattctttttacctttttctctggtgaaagcaaattccagatcagcagattctggggagcaggcgaaactggaaatcagtaatttctcttcggttttgtccggattcataatatagtccagcgcttttttgtcagttactttaatggggaagattttaatatatgccatatctcgtttaccatccttttcaattcttccatttcttccgggtacaaatcaccagtggtgtttaccttttttgcaatttgattgatgtttacaccgattttgtgcatctcttcgtacacctgcttgatcggggctgtgtcggtgttaatgatatagccgtcgatagccattttcctaagataggctcccatatttctggtctttgagagaatcatcttttggcggatcagcttcttttcctctggagtaacacaaaataagatttggatgtttctttttctgtttgacatgtctagtttctccttctgtacgtaattcggttttggggtgcttcgggggtttcaatttagggcagggttccctaaattgccatttttgcggaagtgtatatacacttcctgtccttgctgttctatcctctaatagataaattcaggtgaaatagagaagtgcaaaagaatttgagaaactgaacaggtagtgcagctcatgaaaatgtggtatgattattgtcaatatacgagaacatccagaggtgaaaaaaagagtggatagagaagaaatctttgaatatgtgaagaagcagtatggaacaatacctgaatatttgtggagcagttctccggatagtgcagtgcttcgccatcataatggaaaatggtatgcggtgatcatgaatgttgagagatccaaacttggattggatggagatgataccgtggaaattatagatgttaaatatgatccggaaatgacaggaatgattatccagacctatggttttctgccgggctatcacatgaataagcaacattggattacgattttgttggatggaacagtaagggaatcgaaaatattggattttctggatatgagttatgatttgattgatggattgcggaaatgataagaagatttgaaaataaggatttggatcaggtaatgtccatatggcttcaggccaatatggagtcacattcttttatagaggcagactattggaaaaataattatgaaatggtcagagaaatgattccaaaagctgaagtatttgtgtcagaagaaaatggacagatcagaggatttatcggtttgtttgatacctatattgcagggatttttgtaagagcagcggagcaatcgaaaggtgtcgggacggggctgcttcataccgttatgaagttacgagataatttgtggttgaatgtttataagaagaatacgagagcagtgtcattttaccagcattatggattccaaattaaaaatcaggaaatagatgaaagtacatcagaggaagaatacacgatggaatggcatcgttaggtgggaggtaaaaaagtattagcacagctgagatataatttgaagattgttgagataaaaatgcataaacatttagttttgccatagccattgatatattttatctgaacaggaagtaaaattttgatttggtgaatttttttaatgaagataaaaaaccggggatctagagaccgtttcaagttttgtgtaaactgaaaaaactgatataagatgtgtcattggttactttgggcagagccgatttttttgaggttctgcccttgcttgtattataatgcagtttccagacatgtcaagcagagctggctgagccagccctgccaggccagaaaaagcttataatccagataatcgttcttcgaaaaatatctccagttgtgaatgaatctgtccccaatcctgtcggtgtccagtccattttttcgtgatatccatcatggccagatacaacatttttaagaggctctcatctgaaggtaatatcgtcttggctttcgtaactttccgcaattgccggttaaatccctcgatggcattcgtagtatagattaagcgacggactgcttccggatacttgaaataagtcgaaagattcgcccagttgtccttccatgattttgcaatcttaggatatttcccgctccatttttcatcaaagctgtctagttcagcaagtgcggtttcttctgttggagcagcgtatacacgttttagatcagccattaggggcttgagttccttgtaagaaacaaactttgttgtgttccggatctgatggatgatgcactgctggatttctgtctgggggaatacagcctcaattgcctggggaaatccagtcagcccgtctacacatgcaattaagatatcatctacgccacggttctttaatctgttcaaaatggaaagccagaatttcgcgctttcgttctggccgacgtacataccgagcacatccttgtgaccgtccatgtcgatcccgattgcgatataaaccgcgcgttttacaatccgaccttcattgcgcacatgatagtgtatagcatccatgaaaacaaccgcatagatttcttccaatggcctttcttgccattctttcacaataggaagaatcttgtctgtaatcctgctgatggtactatcagaaatatcgatatcgtatagttcccgcatatgactttcgatatcgcttgtagtcatgcccttggcatacatggagatgattttttcttccatgtcctgtgtaatggtgttttgatatttcttgacaatctgtggttcaaactcaccctttctgtccctgggaatatcaatttccatatcgccatagctggtatgcatagttttctgagaatgcccatttctggaattatccgtttctttgttacggtaatcgtacttggaaaaaagatagcagggctgagaatatctgttgtcaaagcaatagcaatcgtatataatagagacaagtgaaaacagagtattaagtgtgaaagatacagcgatgtgtcttttctgaaaagggaattaggtgcgaatcctaaacggtccagccactgtattccgggagtgtttttcaaggatccattgtgcattgcatgagaaggagaaaaatacgatgatcggggagtcaggagacctgcttagtactgggaaatgcttctgagaaaagcctctgcctgaaaaatgatagttaagtatagagattgaaatctgccagattgccgcggcctggcataccggggagatatttttctatcgtataatcagaagggcaggaagaaattcctgccccttttgctatagtaggagagattccgttctctggatgaagtatttctaatttcacgaattccgtctaaatcttttgaggtgtgcaaagaggagcagaaggttaatgacagaagagtaaaaaatatttcaaaggagaaaaagaaatgagaaaaagagttttaagcttattgctggctgcagtaatggtattttccattagcggctgtggaaacagtgcagaaatcacaggaaaaacaagtgatcaggagaagacagcagaagtttctgaggctgtggaagagcaaactcagacagagacagatacggaaagcaagaaagaagagtctgcttccgaatccgaaggtcagacagaaaatgagacggagatggtttttgcagcatcccggtatgcctgcccgggtgcccaggatgcgtattactgcagttctgccatgggcgtgtgggaaagtctgattgatgatgggccggacggaccccagggggttctggcagagtcttatacctataacgacgatgcgacagtatggaccttctacctgcgcaaggatgtggtgttccatgatggagaaccttttaatgccgatgcagtgttggcaaatattgaacggacgaaaaacccgcttgagtccggttatacagaattatcctatgaacggtcatttccggatctggaaaccattgaaaaactggatgattacacattggaattccagttttccaaaccggtgccggatctgctgatctccatgtgcggatatggatctcctatgttcagtccaaaatgctttggtgaggacgggaatttcattgagccggccaaaggaaccggtccctttatgttgaaagaagaaaatccggagcaggatgtgacagcagttcgttttgatgactactggggagagaaagcaaaaacccaaaatatcaaactgaaaactatcaaagatgcggatacccgtatggcggccttgaagtccgaagaagtaatgggcgttgtggatctgggcgccatagagccggctatggctacggaattggttaaagatgaccgctttgcaatttctacttacaaaagttccatgactcatctgatcggatttaatggatcagagtttccttacaatgataagcgttttcgggaggcagtaagtcttctcattgacaggcaggcgattgtagattctattttttccggatatggagtgccgactacgaatttgattaatcacgtttcaccttattatatagagacgcctattgaacatgatgtggaaaaagccaaaaaactggctcaggaagtgctgcagggagagacaatccaggcaaaactgattcttcgccagaaagactgcgaccgttatccacaggaaaaggtggcagtttatctgaaatccgtattgcaggaaattggtgtagaagtggacatccaaatcctggaaacagaactttacagtgaagtcatggaggaaggaacagactgggatcttaccgtaaacaaacgacagcttccgggaacgactcttgagatcattgaaagttatctgggcggtgagggagaagccagtcgaagctatcatatggattacagtgatccggaaacagatgccataatggaagaggcccgctatgaagtggatccggaaagaagacaggaattgtttacgcagcttcagaatattttgtatgacgaacttctggtagttccttatcttcacgatgaatctttggtggcatataataaaaagattggcggtttcggtctggattatcagggaaccacagttcccagtacttattgggtagaataatatgggaaaatatattctgaaaaggctgctgactttattgccggtgctgatcggaattacgatttttgccttccttctgggcgtgctgtcccctggcgatcctgccagggcagcactgtccggcagagaggaagaagggatcatcaccgatgagatgttagaggcgaaacgccatgaaatggggctggacaggcccttttttgtacagtattttgattggatgggaagagtgctccggggagacctgggggaatccctgatcgacaaaaaagatattgccgagaactttcggatgcggtttccggttacgatagaattggctgtgatttccacagggattacctttgtgttgggggtggggctgggaattttgatggctttttttcatgggaaatggttggatcatctgctgaattttctggcaacattttccatgtccctgcccagcttttgggttgccctgctgttgatgacagtattttctgagacgctgcactggctggacacttccggatatgaaggatttcattccctgattatgccgtcggcagttttgtccctgggtgctatcggagcaaatgcccggctgatgcgcgccacatttttgaaagaacagggaatgcagtatgtgctggcggccaatgcaaaagggctgcggcagagaacagtgactgtggtgcatattctgaaaaattctctgttgccggtgattaccatgagcggtacccggttcgccgggatcctgggcggctcggctgtgatcgagagtattttttcactgccgggaatcggcagttatacgctgacagcaattcaaaaccgggattattttgttgtacaggcttatgtactgtatatgggagcgatttatgtgtgtatgaatcttctgattgaccttttgtactttattttaaatcccaaaatgaaattaaaggatgagaacagatgaaaaaaggaaagaaagatatttatttgtatgcggggattctggggataatcctccttgtaagctttctggcgccatggattgccccctgtgatccggaagcgattgattttgcaaagattctggcgcctccgtcatcggagcatctgttggggacggatgacatgggaagagacttattcagccgtattctgtatggggggagacagtctattctgctggcttttttggccaccgctttttctgctctcatcggtttggtgattggagtcgctgccggttattacggaggaaaagtggatttattgatcactacctgctccagtattttccagggcctgcccggaacaacaatgatgattgctctgacaggagtgctggggccgggaatgcgaagtttgctgattgcagtaatcattacttcctgggtcagtttttcgcggattgtgcggggagaggtaatgcgggtgaagcaggaatattatatggaaagtgcaagggggttgggagcaggaaatatgcggctgctgtgcaggcatatcctgccgaacatcatggaaagcataattgtattgtttaccaataaaataggaagtgtggtgttgtctgtggcctctttgagttatctgggatttgggctgcagccacctacgccggactgggggattatgattaaagaggcccggacttatttccgcagtgcgccgttaatggccattgctccgggaatctgtatcatactttttgttttttccatccattccattggaaactggctaagagaccggatggatgtgcgtagtgaaacatctgtggaggtatagtacaaaatgggagaaaatattgaaatacgaaatttgaacgtccggttttccacaaatggaaaaacgatacaggcattgcgggatgtaaatctgatttttcgggaaaagaagatcacagcgttgatcggagaaagcggaagcgggaaatctgtgctgggcatgtctattttaaaactattgcctgcaaccgctgaagtggagggaagctgtttctatcggaaccgcaatctgtatgaactgagcgaaaaagaaatctgtaaaattcgatgccgggagatcagtctgattccgcagaacccgctgatgtctctgaatccggttctgaagattggaaggcagcttgcagagccgctctggacccatttgaaagtgccgcgaaaagatgcatggaaggcggcagaggaaaatctggaaaaattttcttttaggaatccgaaagtggtcatgaatcagtactcctttcagatgagtggtggaatgaatcagaggattgtatcctgcatgggactggagtgcggttcctcctgggtgattgctgatgagcccacaaagggactggacagtattctgcgccggcaggtgtatgaagtgctttgccaggcgagaagcgatgggagcagcagcatgattctgatcacccatgacctgcagctggccaggaaactttgcgactatatggccgtgctgtatcaggggcatctagtggagcagggaacggtacaagcggtgatggagcatccatgccatccgtataccaggggacttttgaatgccatgccagccagaggaatgcacagcatccctttggcagtgaaaggacagaaaagagaagattccggctgtccattttacagtcgatgccaggaggcctctctccgatgcagaaaggcagacattatggaatgtgcggtttctccggatcagagtgtgaggtgtatgaattatgcttgaagtaaaaaatctgaccagggaatttgaaaaccgattgttttgccgggagaagatccaggcagtgaagcaggtttctttccgggcagaaagaggaatgacgctgggaattgcaggaaacagcggatgcggaaaatccacgctggttcggatgatcgcaggattgttaaagcctacagaaggagaaatctacctagatggaatgcgtttggatcatatgaaaagcagaagagaaatcagtcggaagattcagctgatttttcagcatccggaaaacgccctggatcccagtatgcggatccgggacagtctcctggagccattaaagattcatggaatctgtgggagaaacttgcaggggcggcaggaacggatggaaaaagtcatggaactggcgcatattgggcaggaactcctttctcggtatcctcatcagatttccgggggagaggcgcagcgggtctgcataggccggatgctgatgctggaaccggaagtagtgctgctggacgaaccaacttctatgctggatgtgtctgtacaggcatacattatgaatctattgaaggaactgcaggcccaaatgggatttacctatatcgttatttcccacgatctggaagtactgtgcagtgtctgtgatgaactgctgattatgaaccggggagaaattctggaaagagggaatccggagcaaatctttcagaacccggttcatccctttaccagggaactggtggaagcatttacttattttatgatgtaggtgtcaaaagtcgattgttcaatggcttttggcacgcatacagttacttttgttctttgacaactgaataaaactatgtttttcaatgatgcatcatgataagaaggggatttatccctttacgccagctcaaagcttctgcatcttaacttgcctttagtaaaacgtattaatttactgaaatttagggcagcaactttaaagccaaagaactgctttgtcttcagctttcctcttaccggcattttgtccaccgtgtatttatttctgagtatagatggaactgtttccactccattgcgaattcgtcctatgaatgttcggatttcatcattcattagttctgtagactccagaatccgtcttcttgattttagtggaataatcaggctggctgtcctttcttttacattaggattacatttgctttggtaagggcagccttcgcactgatgtttatagaaagatactcgtatggaatctgtttgttttatataagaaccgcttttaggaacgttgcctgccggacagctggttattttatgtccagtttcatcaagctcaaactgtcccagtatctctttgggtttgcgcccaagaagtcctgtagttaaaaggtccatgtttttatcggcagccagcctggaagtttcttcgctggcatatgcaccgtccgtaatgagggcagatgtttcttctgaaacttcagcgttttccagatattctttgataaatgaagcatcgcttcttgtgttaacgtcatactggtaatcaacgattacagatcctttttcatctacagcttcaacaaggtttgcagaatagcctttgtggggtttgcctgccttgcttctgtaggttgcatccggatctgatggattttgcaaaatatcaggagtcatcccgtcttccttggcctttggaatccggttgcctttatcatcatttttggtctgttcatcgatggccctctgcaaaagctgataatcatccgtctgaccatactcatccttacatttaggcagcagggaaatggcatcgttaatgaccttttggattttttcattctgtggtgtggactgatcatggtaaactatgcggtttctgttattcgggtcttcataatcgttcagtccttcaagaagctccgtttgtccattgcgtgctatttcacgaacgaggtttgcgagacaagtatataaaagttccaaacgccccatctgacggatgttggactcaatcatcatactgtccatccgcttgattatcggagcaatatccatatattttcgaatgttttccgcaagagaaacgatacagtcgtgaataagatcccttccagtaaccagttcgtatgcggcgtttctctcgcgaaatctgctgaacgtacggtcactcaaaggctggttttcataactggtagtatgcagcgcatactggtatctaaaatcaaactcacattcctcaaggagttcatcatcggtaagaccattcagttctttaagaatgagtgcccctacgataacattaaccggagcatttggacgggaatttttcttatcactgtaaagaggcgcaaacatcatctcatcgatattagaaaaaatatgttctgaaaacggttttgcccatgatttatccagtattttttgtttgcgttcagataaaaatccgagtgaatcaaagagagaaatctgctggtaattatttaaaacaaaagacattgtctgtacctcgtaaaatatattttatgcttatattttaccagaaatcgacaataaaacatagctttattcagttgccaaggaactaaaatcagatgttggtgtacttttgacacccacatcattttataaaaaaataaaaagagtaagcatctgacactgttcgaggaagcgcttttgagttgggaatcatataccatcggataagacataatgggaaagtagaacgccagcacaggatagatgaagcaagattttacaaatatatgagaatgtatagtctggaagatggacgaaagcagctggcagtgtatcagaagaagtcaaatagatacatcaagacatgtctagggatgaaaagcccgaatacaattgtaagaatgtaccaaggagctatgttttaaagtagccaagggtgacagcaaagtatgctgtcaccgagccccattatatcataaagagaatgtcaaggtcaggtagtattccctgcgggaatctccaccttacccttgacattcctttcagggtgaagtgttaccaatcattgacacctatacacgcatgatggaattaacatcagttccatccttgacctttacattgttttcttttagatagctgcccatcatttcccgaagggctgctttttgtggggtgtctttttttcttgccataaaataaacctccaaaccggtaagtctatcttacatcaatttgaaggtttacacaaactttgggatactcccgggatctaatcctcggtttttttcaggctggaagttccatcgtccaatttgaaaatctcttccacgctcatattcagataatgggcaagtcggattgccatctccaaagatgggtttcgctccccacgttcaattctgccgatggtacggctgcaggagccggttgcttctgctaggtcttcttgaataagatttcgctctatacgaatatctttcaggatgttgctgattgccatccaatcacttcctttaactttattattgtttcaacagccggtttgaatggcacggactgtattacgattattgaaaaccggggatgtcggaagcatcgcacttaccaacaacttttccaaatattttaaaagagtccgattcctgaattgcaataggtttgtattttttgttcagggagatcaggaataatccatccggttcatcatggagctttttgatgtaggcgtctccattgagatagaaaatgccaatctctccattgcaaatgctgtctttttgttgaatccacgcaatttccccgttgtggtattccggttccatactgtctccagatattcgaactccgaagtccgcattgtccggggcaagatcgcctacttcgtaagattctttcggtgaatcggtcaggaaattaccggtacctgcagaaactgcatctccgaagatgtccataaagatttcttttctgcggaaaggaataatgtttgcaactaccggttcaaacaagccggaggcttttaatatttttgcgtagtcttttatcttatcttttccttcctgattcagaccgtccattacactgtatggatttttcccgaaataagcatcataaatatcttcaatatccaacaatttacagagagttagaaaaacatgcagtcctggttctcgtgcatctgtctcccatttggagattgccttcgctgtaacgtcaatgccctgctgtgaaagtaattctgcaagttctggctgcgaaagccctttcttttttctgttttctgcaataatcctgccaatagaacgcatatattcgcctcatttctatgaaattccgttagattcttatagatgcattatacagcacaaatacaataaaatcaagagaaatctccaaagtgtagataatacaaccaaaatgtcagttgactatctccacaatgtcggcttatactaaccatgcaaggaatgataagaaagccggacggaggtgagaacaggatgggtgacaggacaattttacatagtgatatgaattgtttttatgccagcgtagaaatgctgcatcatccggaactagagggaaagccacttgctgtaggcggcgatccggaagcaagacatggtattgtgttgacggcaaattatattgcgaagaaatgtggtgtaaaaaccgggatggcgctctggcaggcaaaacaggtttgcccggaaatcatttttgtaccgccgaggatggatctgtatttgagattttccagtatggcgagagaaatctattcagagtatacggacaaaattgagccgtatggaatagatgaaggatggctggatgtgacggaaagcagcagtatcaaaggagatggaatgaagatcgcacaggaaatcagtgaccggattaagtatgaacttggtattaccgtgagtattggtatttcctggaacaagatattcgcaaaacttggctctgattataaaaagccggatgccatcacacagtttcatcgaggaaattacaaagaaatcgtctgggggcttccagtgtcagatttactgtatgttggcaggcagacaaacaagaaattgcagaagctggggatccataccattggccagctggcacagacagatgaaaaactgctggacagccattttggaaaaatcggtctggtgttatgggcatttgcgaatggatatgattctgatccggtttgtatggaaggatatgaagctccggtcaagtccattggaaacagtacaacgacaccgagagacctggaaacagatctggatgtttggatcattctgatggcattatcggaaagtgtatctgccagattgcggaaacatggtttcaaatgtaatgtggtggaaatatcaatccgggataacgggctgaacagcatcacaaggcagaagcgtatcagccagccgacgaatattacggatgaaattgtaaaagcagcatttgaattatttaagaaacattacagatgggagcatccgatacggagccttggcgtgagggggtctgatctggtaatggaagatattccggttcagcttgatctatttgataatcaggagaaacgggaaaaattagaaaggctggatcgggctgtggatgagatcagacgacggtttggatatttcagcatacagcgggcagcaatgtaccaggataaagtcttatcccacttggacgccggtacacatacggtccatcctcacagttattttcatggataatgggagggatagatttgaaacagacattaaccagaaaacaggaagaaagctatcagtgcattgtaagatttaccgaggagcatggatttccgccaacggtcagggaactgggggcattactgggagttgcctcaacatcaacggtgttttccagaatcaaacagttagagaaaagtggatatatccggagagttccggcatctccaagagcaatcgaaatcctgtgatggaggtgcggcatgaataaggtatatgttgatgtggtagcagagttcagtaaagaaggctgcctgattccaattttatttgtttgggaagacggcagaaaatacaagattgataaggtgcttaagattgaacgatgtgccagcaggaaagcaggcggtgttggtacgatgtatacctgtatggtacaggggaaggaaagccatttattttttgaagtagataaatggttcatggaaaggaagatttcataataaaaaagaagaatattaaccggcggagatagtcactttccctttatatcccgttggttttacataaggatctgttttctgatcagtcggtgttccccacaaacaccatttgggatatggatcctgcaatgagtaatttagattgctttccatcaaaatcatggggaaggcgaactggtctgcaagacctaccagttagtgtgattgttgataaggagaataaaagatttatgacagacagagattatgcaattaaatcaatgaaagagattacgttccagatggcaacccatgcacaggattatctggaagtaaccatggacaggcattatgaagacataaaggcattgatggtgaattaccagaaactaattttggaaaataagatggtactggaagagctggaaatggaatgccaggagaagatcaatgaggatatggcatatgcgttgagttatcttgatatttacgggaaacagctgaatgtgacaaaactgaaacacgagatgaataatttgatggtcatatatgggttgtcggatatggtttaccggggtattacgttggtaaaatattatgctccggatggagtaacgctcagtgagattatccattcctgtttttgcagccattacaataaaacagatgtggaagtccagcaggaacttggcattggaaggacttcgttttataaaatgaagaaacaggcattgcggtatcttgggttctacttttacgagatcgtagtgccgcaggcaaaaaacaaaagattcaaaccctccttgggtgtggaagaagagtaggtgattgggttgaaatatgaaaattcaatggtaaagattgcagatgatattatccgggatcagcaggcagagaggaaggttcagaacaaaaaacagaaatggcatgatgaatatgcgaccttgaaattctttcggtacatatgcagaaatgttggaaaccttcaggaaggagaaatccagcgtttgatatggcaactgaaacagtcagataagaaagcagtcgaaaagcatttaaaaggctatgcgtgggaatttgattatgagaaaatgttttctacattgacgcagaaccctgtttgtcagaaagtatgtcagaaaaataaatatacaagctggatgcacttgatcagccgatactgtacagaagattgttaggaaataggacaccttcttgcggctaacaatggattattttattgaataaatcatgtattagttctatagaacgataacttgttttgcggcttctgtatatcggaacaggcggtagttatactaactttagaccgaaaaatagttctaaaggaggtgctgcgatggatctgaaagctgtaggacagagaattaagatggcaagggaagcaaaaggtctgacacaggaagatttggctgccatggtggaactgagtccgacacatgtaagtgtgattgagcggggattgaaagccgcaaaactggatacgtttgttgcgatagccaatgctctggaagtttctgcagattcacttctgatagatgttgtggcacattctgtaactggtgtgacgaatgaattatcagaaatgatcgggaaacttccaaaagaagagcagaagaaaatcatcaaggcggtcagggcattaacagaatagtttttatgaggaggggcggaagcccttctttttttgcggtttttgtcacaatttgtcaaacgaatggggattctgttttgtttttatctgtgctatagtagttctaaagaactaatactaattcaaaaagaggagatataaaatgcacagaaaaactatttttgagaaggttgctgaaaaattccataccactccggaagaggtatatgcggaaatccagagagcaattgatgccggatatgataacacggatccagaggtacaggcagaatggcgcaaagttaaaataaaaggggatagaccaacaccggaggaagtaatcaactatgcagtaggtactttaacagcagaacagaggtgattattaaattgaagaggaaaaagtatgcgttaatatgtctgttattggcagcaacctttgtttcgggctgtgcgcagaaacataaagagggagagccggatgtcattagcagtatgaaaacgaatcaggatgaaatacttactgttgttgcaaacaggaaccagattgaagataaagaggattttgcaaaatttcttgtcgaaaaatgtaaggataattcttttcagtctgttagattctctacagattatgggtatgccaccagcctgaatcttagagtatatctctgggaagatgagatagaaggacaggagccggtaatgatggttgaatataagcctgttgaatggggaatggactatgatattgtccatgatccggaaaagttccaaatgtatgtggatggagagctgatggaaaatccatagatttttctgataaagactgcacaaaacagcttgccacccttacgactgatgaaaacggaaatacagatgtcgtagaggtaaaggctgacacagtctatatcaaggaattatccgcactaatcaagacaccaaagaaaagcaccagagaaaagaggataggaaacagactgccaatgatagcgatatgtttcagtttcattttttcttctgtcctttcttcgttacaaggttacgagttttctctgtggtctgctgaacctttgtcctgcggtctttggtgtaattctggcgtgtttcctgcgataccactttttctacattctgcctatgtactggctgtgccgactgggtcgctttcttatcagaagcaccagaagataacggacgctctttgataacagttcctttatcaatctttttcagcatttttaaggtcggtgctacctgcctttgtacccaacgcaatgtgcggtctaaagtataaggctctggctttgtcgtcagcttcaagctctgtctgttatcgccgataaaccaagcccagcggtcattgagcttccagtcattttttcgcttgtctggttcttcatcaacaaaccgcacatactggttgataatagaaaaggcagtctgctctgcgtcataatacgtcagcaaatctcgtactgcatagtaagcacgttcattgcgaagccgtatctcaaaacggttgataatgtcagcttcttccagaggtgtccctaacttgacgtactgctcatagtccttttcatagatacagaaatacacatctgatttcagcgaaccaagataaagggtgcgtcccatatattctctgtcgtcctctctgtgcttgataagctcgcccgactgataaaacttatagcttctggactttccgatatattcccgtttcctgcatttttccgcaagctctggaatatccaaaattcccgtatggtcgttgatagcaaggtcgatacgcttcatcacgccaccgtctatgagtgcgtccatgagaaagtcataccagcttctttgctgtgccagcaggtaaccttcaaactgtcggcaaccacgcccctttaactctaaaaggacacctttttcttcgtcagccgacgtatagataaagatgtcccctaatgaataatgctccgtataactgtaatgtccgtaatcttcatggagcatatagttgatattcagttttaatatatctttgatgatgtgctgtatatcaagcgtgggaaaacgaattttcacataatcaaacagcatggtaagtggtgcttctggattgaaccttaccagttctttatgcagagtttccagaagttcttttgacggcttcatttttccgctttctatcttgttgagatattcccttgtgataccagaagccaccgccagtctgccttgtgagataccgtaagcaatccgtttctcccgtaattcttttatccattgttcttcattcagaaccatacccccaatctgtcaagtgtgaagttttttaagacgacttcacagccgatttttgctaggaaaccatgccagaagccttatgtttcctatgttttttgtctattgtctatttgcaaacgtacccctctgttagataccgaggggttttacctgctggcgtggctgacgccacaccagcaacggctagtccgtgccgtcgcctttcgcttcgcacgtcgccgtcccgtcctgccttgcttgtgcaagagagctgatagtctgtaaaaaatcatgtccttttgggactaaaggcgtgtaaaactcacttatgacgcttgttcccacatcacaatagccacgccccttgatacgcttctgaaaaaactgttttttcacatctgaaccgaacagcataccgtaacctaattcgctgatacgcccaagtcccacacggaaattgaagttatctctgataccatctgaaaaatactttgcgtctggacgctggcaggcaacaataaggaaataacctgcttgtcgccctaacataacgattttctttaactggctaagtaagctcacgctttcttttgtccccagcatttcaaaaaacgctacatattcatcaaagataagaaagcagggtggaagtcccagataggcgtagttttcgcccgtcttatagttcgggtgttgcttcatttcctcacttcgccgtaccatgccctcataaaaggcattgacgcaatcaatcatttcttctttggtgtgatagacattaggcatgactgttcccaagtctgcaaggtcgctgttctttgggtctaagatataaaggacagcgttggtatgcagtaaggcttcaatgagcgtcagcagaaaataagttttaccgccaccagtcccaccagcaatcaaagcgtgagggagtgcgtcatattcccacacaagatttttcatcagcctaagacagccgttttctgcccatacttcatcaatggtaatgcggtttgctatcatgtcataaagcagggtgtattcaatatagccgtcatgtaaggtcttgtcggtcagctcgcaatacaagccactttccaatttatcctctaaccgtaaaagctggtcttgatattttcctaacgtgatttcacagcggatatggagcaatcccttttccatttgataataaatctttggaaaccagacgattttttcccttgatctgctttgcaggtcagtaaaaaaaccgctgtcttgtacggtatcggcttcataccacttattttccagtatcattcgtgccagcttttgacggtgcaatagcttcttgaaactgtcgtaacagaagcggtaatacagaaaagcgaccaatgcacaaacaccagtcgctatcagcacagttatgaagttgtaaggggaaagcgtcaagccgttttctaacaagctgaaatgttcccagtcggtacgcatgagctgtttgatgttcagtagcagaagaaccgccatgaatacaaacagaagcgtccctatggaaaagtggtagacaaggtgcttgtcgctggctctgatacggtgtcctttgttccaaatcatacgcataaatcaatcctttctaggtatgaaaaaagcagtcaatcctaagactaactgcttaatcaacaataaagtgtaaattttattgtttcttttcttcttttttatcttttttattttttctatcccaccaagtacctgctaatgaacaacttccgcccataactataaagccaatcataataagccaaaattccatgatttctcctcccttttaatttgttaaatgctggcaaataaaaattacaacaaaacatataataagtgcgattacacctgcaatgaatgcaaatatgattttttgataatttctttttcctatttcttgttgtgtttcatcatgcgttaattgctttccgtcaataaatgccaaaatttctttataggtttgaatgtcatggctctttttgaatttttcaatcttacttgccgtatagagcgttattgcaaacaagcataaccaaataataattcctatatttcccttaatactaaataaaggataggcacttatggctacgactatcaattcaattaggaaaactacacttatcacattaaactttttaatagttgctttttctacaatctccctcatctcctttatatcttcttttataaaattatctaaagacacattgaagatattagataaagtaattaaacttttaacatctggacaacttttatttgtttcccagttagaaattgtttgtcttgaaacaaatattttaagagccagttcttcttgagaaattttttgttgttccctaaattttttgatttgtaatccaatatccatcttgaatcttctcctttattgtatatgaatatagctattttgtctgtcaaaagcctttgacattgccattttcccttgtcaaaatagttttacatggcttaaaacagaacttttcaactaattatatcggttctatatataagttacaagaaaaatatgggctcacatttattttttcatctgtccttgcggtacatggttctgtggattgcctgcgttctgattgcctttattcttcaacacaatatcctctgcctttacataccagtccacatctgcacccgtataggtttttcgtgataccgtatctgctactggattgacaagctccacaactgcattgtacggaaattcccttactggtacttctggcggtacagacacggggataattccaccatgcaaactgcacttcaaatcatagatacgctttttaagctgggtactcggtgtcccgtcctcattctgcaagaacacatcacgcaccgctgtaaattttaattctccaaatgttttctctttgtcaataacaaatccgtttgataatctcataatgtttccactcctttacttttcttcaactgctacaatatcatcagcaagcaacacataatcggtatgtcccatatccccgattgcgtaacctctgccgtataacttcggattgacaagttttactttctgctcatacttgaaatgcttttcgccagcctgcacgggaatttctaccacaacattttcccctctctgtacatctgaataaaggttgtagcttcttcttgcgaaaaatctgcggttatctttatctctctcaaaaacatggtcgctttcgcctgcaaattcaagagttccaaaagactgtgccatatctggcacgacatatttcatttccatagtgttttacctcgtttctttctatatttgataagttttttgattgtgatttcttattctgacggttagggaagtaccagcaatcccacagatagtaaagggtaaaataaatgcttacgcacccttgactatccgtgttcttgcaggttgttggcagacaagccagaataagcgtaagtctgccgacacggtatcggcggagagcgtgatttttcttttctcatatcgttaccgccttatgatttcttcgtatgacggcgtttgtagaagaagatacctgccagtccagcaccagaagttagtaataatgcaagcagtccgtaaaggttcgtgttatcgcccgtttttggactgtctgttttatgcggtgtatttggtgtctgtggcgtttcgggtttctctggttcttctgggacttcgggtttttccttaaaggtaattgtctgtccctcgtcctcaatgtccttatgctcggtaactttcttcggctcgtctggattgctcaaatcgtacaattcttcaaaggttacaagctgtttaccgtcaagagaagtagcgtcaaaggtaaaggcaacttccactttcatagtttcgctgtctgcggtaaaggtgtaatcactttccgcacgttttccattgataagaagctctgcattttcttctttcaacatctgccagcctacaagtttgtactgtgtgccgacttctaagccctctaaagttacggtatcaatgattgttacctcttttccagcttcaagctctttgttgccgtccttatcggtagcagtcgtatgaattttgatgatacgctctgtgataagtaccgtctgtccgtcgtcctcaatgtctttatgttccgcaactttcacgggttcgtctggattgcttaaatcatacaattcttcaaaggttacaagatttttaccgccaagctcggacgcattgaatgtataagcaatttccactttcatagcttcatcatcagcaataaaggtatagtcattttctacacgctttccgtcaatgacaagttcagcgttttcttcctttaacatctgccagcctttgagctgatattttgtgccttttgtaagtccgtctaatttgacggtatcaacgattgttacctcttttccagcaaggattgtcttttcgccgtccttgctggtcgctgtggtatggatagagatttctttttcgtattcatcagtcaaagtacctaaatcaatcacaaggttatttcttgataccacgatttcaaatggtgggataagttcaaaacctttgttgctgtcagagcgtaattcttcaatgatgtaggtatcataaggtaacgcacccttgctgtcgtctggttcagaagttccaaaccatacaccgtcctcgctggtctttcctgcgttggtattgtgcttatgagaagcccagtcagcagaagtggagaactgcccgttatcatcagttaccacgacatgactttctcccgtcgtcttgcttgtgatcctaaagggaacatcagcaagacgcttgtgtgtgcctgcaccgattttcacgccctcaatatcgccacgcttaatctgattatagatagaatgggcttcgtcagttaagtccacaatttttccgttttctgtgattgcaaagtcaatcggttttgcaccgtctgtcaaatatccgtttggagcttcactctcaacgatacggaattttccataaggtaaaaggtcagcggaagtagaagcgacaccctcaatgtctgtatggattgtttttaccacttcatttttcttgtatagcttgccctcaaccaataccgcattatcatttaaggaaatgatgtcaaaggcagtatctttcaaagtagcacttccttgtggctttgtatcgcccgtttctaaatctcgtttctgaattttgacaccgccacggataaccttgtctgatacggaaaactggttacttccagtaagtacggcaaggtcgccgtcctctgtaatttgtgtaaggtataagcccttaatctgttcggacttatcgccagcctgcatatatgcaccgtccagcaagtaaccgtttggagcttttgtttcttctacggttagtgttccaagtggaagaactgccttgccgtcctgcatatagaaactgtcgccagatactttgtatgtgtccgctaattttgtaacatgatggattgtaccgtcgctgtctgtttcggcgattgtctttgtaacccatgttcttgtagcttcggcagggagattgtctttattgtagaagccagtataatacttccatgtaaattccgcacctgctaaagaagcgttcccctgcggattgtctttctgtgtttccatatcaatcttgaagagttcaatcaaagtgtctgttactttcggtatatcagatacattcaaggtcgctgtttttccagcttcaacctttaaggaatatatatttgtatcaaccttatatcctgctggtgcggataattccttgatatagactgtgtcagcctttacctctacgacatctgtatttccgttttcatcagtcgtaagggtggcaagctgtttcgtgcagtccttatcagcaaagacaccgcatgtcgcaccagcgatagagtaattcccgttaccgtctgtaatgctggtattactggaagtcttttgaagtttcgcatttccaacattgagtttcgcccagaattgtcccaattcctgcccctcgccagagtagatataaccgccacattcatagcgtcctttattctctttgacaaaggcttttgcaccagcgaaaacttcgtcctgcgttgcctttggaatttcatcataagaagctcgcacgttatcgcattgccagccaagatgtacgcttaatctctgccagacaacaagctgtcttaaaaggtaggcgtggtttttgcttattccgttgtggctgtctgtgtactgttttacatattcgatagataaggcaacgtcgcttatctggtcggcactcatacgggtgcttgcgtcagctctggtcttgtagccattcttaaagtctgtgttaatgtcgatacagtaagcgtcctcgccctcaacggtcaaatgtccctcattaaaggtagaaccaatcgaaccgtcattcattactttttcaacgataccgacacgctcttttgactccgtccagtattgcttactttctgcatgaacgggtgtagtcggcaaagcagtaacgacagttgcaagagctaagaagcccgtacacaatcgttttaacatctttttcataaatctaatgctcctttcatttttggtaataaaataaccgtccataatgaacggctgaaaatagaaaaggaacgtcattttaggcgttccatagtctatgagttattcaatttttcttgtttcaatactgatgtgctgtaccatatctttgcatatctaggaaaacttgcgtatcaaggctcattcaatggtagtaaataagtagtaaattgatgtgtttgtttccttgaaaatgctgatagatactgtgttttagcggataatcagatttttattgtgtttttctgataaaaaatggatgaactgttagggggaaaagagtaagtgaacatttcccttgaaaatgtgtacaatccaatgagaataatgaacttttaagccctgtaaacggacactttctgaactttactctgatacaatggttatgctgatgaaagagggcatagaaaactgaattatatttgagagacggaagcctcagtagtttaaaaaaagactactggggctttttttcgtgcctgaattttcagccaatacctgcaggttttacctggcagtagttagtggagcaggcatgaaccagatcagagggccgccttctgaatttgaaactggaaaacaaatttcaaattcaggaggacggatatgtatattgaacatccatataaatacgacgggaaatactacgcaaatgtagatggaaagatgattgaaatcacaaaggaagtggcttatgccatgaataatttttaccgaagcagccagccaaggaaggtcgaaattaaaaatgaaaaaggtgagattgttgaacggaagttgcgggaaatcccttacagcgagacgaatggacaggattatgaattctctatcgaggatttcccggactatagttgtgatgttgaagacagcgtgatcagcagtgtggagagacgagatatccataaggtgattaatcagctggatgcagaagaacggatgattatttacagcatttattttgagaataaaacgcaggtacagctggcagggattatgggagtgtcccggcaggttctggcgtacaagctgaaaacaattttaaacaagatgcggagaatgtatcaggaaaatattttttgaaaaatcagcagatttttttgcatccgggcaagtcagttgaatttagtaattagagagagttttaaggactcctcaaaagtacattggaaactgaatacccagtaataactgacgtgacatcttatgcaggaagcacaaggaaactgccgccatgactctgatgaatatcggacgagcgaataagcactgaccgaaaatcaactggcaggttgatgatgcgatgatctgtatagggtgcgatacacttgcggaccgtgaaaagtctgtaaccggcaaacctatgaactgtcggagcctgtgtgcgtgagcatatgggttgtgatctggcgaatgcagtcagataggttattattccctgcctgcgtaagcaggataaacgattcggggtatcgaggataaatagaatcgagcgagcactgtttaataatcgaaaattggctatagaggttatgcggcagagcgttcattttgaatgtctctgccgtattcctgtggagctaataatggatgctttacgattaaatgtcaggatgggaggaacaaataaatgaaaattgaaagaggcgatatccttatggttaatttgggacaggttccgggtacttcccttcagagtggaatccgtccggtagtggttgtcagcaataacaaagcgaatacatacagtccggtggtaacggtagtgccgtttacttcaagggtgtacaaaaaacggtatcttccgacccatgtgtttattaaccgttatgaaatggttggcttgaaacggcatgggctggtactggcggaacagatcacaagcattgatattcagagtattatccaaaaatgtggtcatgtcagttctgatgcaatgcggaggattaccagagcggtggagattcagacaggagtttatgaggagggggattatgacagcagaagaatatagaaagtatctggagacagattttgacgatgtggatgtgaatgaattgaaggatatccggaaggttaggattgaccgtagccagacaaaagagaaacggatcgcccagtatctgaagcaggtaggaaacccctacatggtacgtgtggggaatgtaaaagtaaaaatacggtttgccaataatggggtatcttttgaggatgcctttgaggatcttttgctttcggtgtaaataatggtggtaaaatctgaaaagttatgttaatatggatccgaggaattcaggactcctcattcatatcggaccaacatcggctcagcccctgggttttaccattgttgataaaaaggtaaaatcaaggaggatgacgatgaaccaaaatcgtaatatcaagaaaatctaccatgccgccatctatgttcgtttatcgaaagaagacggcgatattgtgtctgccaataagagggagagcaatagcatttccaatcagaaagatctgatcaaaaatttccttaaagacaaaaaagatatagtggttgtttcagaacgggtggacgatggttacagcggttctaattttgaacgccctgctttccagatgatgctggaagacatcaagaggggagttgtggattgtgtcgttgtaaaggatctttcccgttttggaagggagtacattgatgccggaaagtatatcgaaagaatatttccggctcttggtgtgcgttttattgccatcaatgacaattatgacagtctggagggcaaaagccaggcggatgagatcgtgatcccttttaagaatctgattaatgatgcctactgtcgggatatttctatcaaaatccgaagccatctggaagtaaaacgtaagaatggtgagtacatcggagcttttaccccatatggatataaaaaggatgattcggacaaaaacaaactggttgtagatacttatgcggcggatattgtgaaagagatcttccggctgaaattatccggcatgagccagactgcgattgccaactatctgaatgatcagggtgtgttgtctccgatggaatataaacacagccttggaattaatattcaggataatttcaagaggcacgaacaggcagaatggagtgctatgtctgtgaagcgggttctggaaaatgaagtctatattggaacactgatccagggcaggcatacaacgccgaatcataaagtcaaaaaattgatggacaagccggaaaaggactggatccgtattgaacacaatcacgaaccaatcgtcactgaacgggaattcactttggtacagcggcttctggggctggatacaagaacttcccctaatggggataaggtttatcctttatccggtctggcagtctgcggagactgtggggctttgatgatcaagcgagatgtccctgcaggtgggaaagtgtattcctattatatctgttcaagaaacgctgccacgaaggagtgcggtactcacagaatcccaatggaaaagctggaagaaacagtactggagattcttaaaatccatattgagaacatccttgatatgaagagaatcctcgattatatcaatgttgtcccgtttcaggaactggatattaaagaactggaaaaacggaaagaagcaaaagtgcaagaagtggaacgctgcaggcagctgagggattatctgtatgaggatttccgggaagggatcatttctaaagaggattatacggaattacatgaaggatacacggaaaaaaggaaaaaagcggaagaagcagtcaggaacattgaacaccagataaccgaaattctggagtccaaaagtgataaatatcagtggctggattattttaccgaacatcagaacatacaggaactgaaccggacggttgcagtggaactgatagaccagataaaaatctatgacaaaaaacatattgaggttgtgttcaacttcaatgactgctatcagtcgcttttgcgacagatggcggcagttggctgtacagtgacagttgatgacaatggaagggtagaatttgaaaggaaggaggtcgtataaatggcaagaaaatcaagaaagatcaattttgtaaatgtgggaagtgaacttcttgctgcacaggcagaggaagttactgttatgaatgtatcccatgcagctctttatgcgaggctttcttttgagagtgacaaaaacagagagcgaaacactatcgaaacacagatggctcttctccatagttttgtggaagaccagaatgatatagtggttgaaaaagaatacttcgatatatccaaaaccggtacgaactttgaacgtgagggatttgacgagatgatgcaggacatcaagaacggactgattgactgcgtgatcgtaaaggatctttccagactgggtagaaattatgtggaagcaggaagctatattgaacgtgtatttccatttttcaatgtacgctttatatctgtgaatgaccattatgattccaaacgagatgatgtgagtctgcttgttggaatgtcaaatatctataatgagttttattccagagatctggcaaagaaagtacgtagttcatatcgcatcaactgggcaaatggagaatttccgtcaggggtcatggcttatggatatgaaaaagatccaaagagtcccagacatcttattcccgatccggaagtggctcctgttgtaaaaagaattttcagaatgttcatggatggggaaacttatgcagagatagcccgcactttgaatagggaaggatatctttgccctaaagcatataagaggaaaaaagcaggaatagaaatggcggaagccacagaatggaaatggagtggcggaactgtttcaaagattttggaaaatcaatattatgtgggcgacagtgtgcataatcagtttacgaatgacacatgggctgcaaaaaagcagaaggctaatccgaaagaggagtggataatcgtggaaaatacacacgaagcactggttagccgggaagattttaagacagtccaggaaatgatgctcaaaaagaaagagaaaaagagaaaaccgaaaaataaaggagctggttcggtcagtagttttaacttctttaaagaaaaaatagtttgtgccgattgcggaaaaaccatgtatcttagaggcagagttgatggcaataagttttttgagtgtggaaattataccttgaataaaaagtgtttttcccattctgtgaaagatacagatgtaaatgattatgtattgcgtgtcatccgaacgcacattaatgtttatacagaaaatgtggacatggtacgcaggctgaaccagagacaggaaagcatccaaaaatatgatgtttttaacagagagatcagaaagtgcagaagagagctggagaagcttgcaaagcaccgggaacagttatttgaggattatgtgtgcaagctgattgatgcagagcaatatgaagtttttgcagcccaggacacagaaacagaaaaagagattcagaataatctggataatctcctgaaacacaaggttggttatgaaaagaatttccatactgaagaagaatgggaaaaaatcattgataagtaccgtaacacaagaacattgacgaaggatatgattgatgcatttgttgagaaaattgaaatttcgtcagggggtgctattacggttcatctggtttatgatgatatgctggaagaactgagacggtatgcaaaagaaaggaaggctgaaatatgcagataaaacaatgtatcgctgaatatatccgcctttcttcggaggataataatgtagactggaaattaaaagcggaaagtatcagcgttacctcacagagaaaactgatttcagaatttattgccaaacagcaggagttcatggatgtaccggttatcgaatatgtggatgacgggtacagcggaacgaattttaacagacctggattccagaggatgatggaagatgccagagcaggaagaatcagcgttattgtgattaaagatttttccagattcgggagagatcatctggaagtaggaaattatctggagaaagttctgccgctattgggagtaaggattatttctgtcaacgacggatttgacagtgataattgttctggcgtgaccggaggaatgagtattgcgttaaaaaatatgttgaatgcaatgtacagcaaggatctatcgaaaaaagtgcgttcagcaatggctacacatgcaatgaatggtgaatatatgccatcccgccctaaatacggatatatcaaagatccagaagataaacatcatctgattgttgatccagaagcagcagagattgtacggcttgtgtttacgatggctgcagatggagtgaaaaagccccatatagcacgataccttaatgagcataacgtaatgacttgcagggagtatatgaagaagaaaggtatcaagattacttgcgccatagagaaagaaaaaaagctatggtcgcagacaaccatttcagacatgttaaaaaatgaggtctatctgggaaaaactgtgtggagtaaaaaaagagttgcagtaactggaagtaccaaacttgccaaaaatgacagagaggattggattattgtagaaggaacacatgaaccaatcgtgtcagaggaattatttgcaaaggcgaatgagatggcattttcaaaagaaaaacgtccatacaaaccaaagaaaaaaagtcatgcaattttgatgtgtccatcatgtggtagacggttggacttaacaggatctggtaaatcgtatcgctgtccacaagcacacatgaccggacttccagagtgttccaacagcaagatggacaaagtggaattggaggaaacggttttagcctgtgccagaaacatggttcggtttatatcagaaaatctggaaaagaagaaaaaagtgtggctggaaacatctattcaggaagaaaaactctctactctggcgagcgaaaagaagcgtctgtcatccagaaagatgaaattatattctgattacagaatgggaagtcttacgaaagaccagtatatctcagagctggagataacaacaaaacgcattgctgaaattgatcagtgtattccggagattgaaaatgaaattgaagaagcccggaaaaagattgaggaagcaggagcgaaacaggcagagctgaatgatattgcagcattacagtcttttgataaaaacgtgctgtacaagattattgataaagtgtatgtctatggcggcggaagaatagagatcatctggaaaatggatgatattttctttgtgggagataagagtaaagtcatagatgtgaataatgagaaaaaagatgagtaattatttgcaggagcatcgccagggaaaactggcggtgctttttgcaagaaaaacatattttttttagtcttatattgacaaaagcagaactggtgaacttgaatatttcggatgttgattttgaggccagagaatgcattgtttttggaaaaggtgataaagagcgtaaagtatactttgatgcaaaggcaaaactgcatttacaaaactatttaaggaagcgaaatgatgataatccggcgctttttgtgacattagatgcgccgcatgatcggttgaaaatcagtggcgtggagattcgtattcgtgcactgggcagaaaattaaaaatggagaaaatacatccgcataaattccgtagaacaatggcaacaagagctattgataagggcatgccaatcgaacaggtacaaaagatattaggccattctcaaatagatacaactatgcaatatgctattgtaaatcaaacgaacgtaaaaacatcccatcaaaaattcattgcttgagacaattcggatttgaggggatgatgtagatgataaaaactatagatgaatgcttctttcaaatacagaacggagcaaatataaaacagggagatgtcgacagtggttttcctataacaaggatagagacaactgcgaataataagtttaatagagatagaatgggatatgcggggataactgatatttcaaagtatgaatcatatgttcttgaagatggtgatttacttatgtcccatatcaatagtgttcagtatcttggaagaacagtattgtatgttaaagaagctgatgagacaataattcatggtatgaatttactgcgacttaaagctagacgtgatgttataaatcctgcgtatgcaagatattgcttttatggacattcatttaggagtaaagtcggtaatattacgaagaagtctgttaatcaagcaagttttgctgttaaagatttaaagcaaattaaaatagaagttccttctctttctgaacaagatcagatagttaaggttctagataaacttcagaatttaattgaaatgagaaatgatgaattatttgctttaaacaatcttatcagagcccgatttgtcgagatgtttggtgatccagttgctaatgataaggggtggaaaactgaattatgtaagaacttgatgagtaagattggatctggagctacgcctaaaggtggtaaagaaagctattgtgatgaagggatatctctaatccgtagtatgaatgtatataataacaggtttgagtataaggatttagctcacataacagatgaacaggctgaacagttggacaatgtaacaattgagaaaaaagatgttcttctgaatattaccggagcatcagttgcaagatgctgtgttgttccagacgatttgcttccggcaagagtcaatcagcatgtatctattatcagatgtaaagaaaaaataatcccggagtttgtttgctgtatgtttacggaagataattatcaaagactattgtggaatattgcgacagctggtggagcaacaagagaggcaattactaagcaacagatagaggaactgacgctaatagttccaccaacaaatttacaaatgcaatatataaattttgtttatcaagtcgacaaattaaagttgaaggcacagccaatataaattttcattaatatttttgcctcaatatgttaaaatagaactaaagtaaaggaggtttccccatgacgaatttcgattttttacaatcagatcctaaattcaatacattttccggcgttgcggttgcggcggagaaagttttaccaattgatgttgcatcttctgttataaattgccgtcgtgctatggaatttgccattaagtggatgtattcagtagatgattctcttgccaagccttgggatgataaattggtcagtttgatgaatacagaagactttcgagagattgttgatcgggatttgtggatcagattggattttattcgaaaaaaaggaaacagtgccgtacatacaggaaaaaaagtaacgcaggaagaagccatgctttgcttggaaaacctgtacatatttatggatttcattgcatattgctatggggaaaaatatgaagaaggaaaatttgaacccaagttagtttttgaagaaaacgaagaaaaagtaatccaggagcctcttatttctgatgtagatttgcaggcgttgataaaagaaaacgcggaactgaaggaagcgcttacagcaagacgtaaggaacagtaccagaattatgttcccaaaccattggatatttcagaatataagacaagaaaaatatatattgataccttgttggaggatgctggctggatcctgggaaaagattggctgaatgaggtggaattacagggaatgcccaataagagcggattgggacgggcagattatgttctgtatggcgatgatgggcgagtcttggcagtcattgaggcgaaacgtacctgtgaggatgtggtaaaaggacgtcagcaggctattttatacgcaaatctgatagaaaaaaagcagggacgccgtcctgtgatttttcttacaaatggatttgacaccagaattattgatacctgctatccggaacggcgtgtttcggcaatatattccaaaagagatttggagaaatggtttaatcttcagtctatgcggacaagcctggcaaacgtaaatgtcgataaggaaattgcaggacgctattaccaggaaggcgctgtcaaggcaatctgtgacagctttggaaaaaagaacagacgtaaggcgttgcttgttatggcaacaggatctgggaaaacaagaacagtgattgctcttacaaaagtacttttagagcatggatgggtgaaaaatatcctttttcttgcagacagaaattctttggttacgcaggcgaagagagcttttgtaaatcttcttccagatttatctgttacaaatttgtgtgaggaaaaagataattatactgctcacggtgtgttttctacctatcagaccatgataaactgtatagattctgttcaggatgaaaaaggaaaattatttacaaacggacatttcgatctggtgatctgtgatgaggctcaccgttccatttataataaatacagggatatctttaattattttgatgctccgctggtggggttgactgcaacgccaaaggatgaagtagataaaaacacatatgaagtatttgaactgcaaaagggtgtgccgacgtatgcatatgaattatcacaggcagtcaaagacggatatttagttgattatttatcggtagaaacaagattaaagtttatagagcatggaattgtatacgaggagctctcagaagaagagaagcaggcatatgaggatacttttaaagaggaagatggagaacttccagaaagtataggctctgcagaattaaataaatgggtttttaacattgatacgatccgtgaagttcttcatgtgcttatgacaaatggattgaaggtcgaatatggaaataaaattggaaaaactattatttttgcaaagaatcatcgtcatgccgaaaagattttagaagtgtttagtcaggagtatcccaattatccgggatatgcaaaggtgatagataaccatacaaaatatgcacagtcggcaattgatgaattttctgatccgaaaaagcttccgcagattgcgatttcggtagacatgcttgatacggggatagatgttcctgaagtgctgaatttagtgttttttaaaaaggtaatgagtaaggcgaaattctggcagatgataggaagaggcaccagattatgtccggatttgatggatggtgaggataaaagcaaattttatatttttgatttctgtggaaactttgaatttttccgaatgaatgaaggaaagcccacagcaaatatgctggccttgcagggagcaatatttaacctggaatttgaaattgtatataagctgcaggacttggaatttcagacagaacggttaattgcatatcggaaggggctggttcagcatatgcttggaaaagtgcaggaactgaatcgaaaaaattttgcagtcaggcagcatttgagatatgtggaattatactcagtagaagaaaattatcagactttgacgtatgaggataccttaacggtccgggatgagctggctcctttaatagaaccggatagagatgatgcggaggctttgcgatttgacgctttaatgtatggtgtagagctggcatatctggcagggaaaacgtattcaagagcaagaaaggatctggtaaaacgggtggaatcgcttgcagggattgcaaacgttccggaaattatggttgagtcagatctgctggataaaattttacacacagattatcttgaaagagccggaatcaatgaatttgagcagatacgcgaaaaccttcgtaatctgatgaaatatattccaaaaggaattcatcgagtatatgagacccactttgaggatgaaattttgtccatggactggaatgaagcagaattggacagcgacgatcttaaaaattacagggcaaaggcagaatattatgtacgtcagcatcaggataatgaagtgattgcgaagttgaagggcaatatccctctgaaaatatctgacataaaaatgcttgaaaaaatattatggagtgaagttggcagtaaatcggattatgaagctgaatatggtcagaaaccattgggagaatttgttcgtgagatagttggacttgatatgaatgctgcaaaaacagcatttgccgagtatttggatgaaacaaggctggacagcaggcagatttattttgtaaatcaaattgtagaatttattgttcataatggtttaatgaaagatttatctgtactacaggaagcgccatttacagataggggaagtatagtagaaatttttaaggattcatcatctgtatggcagggaatacgaagtgtgatcaatcaggtaaatgcaaacgcaatggcagcgtaaagggaatagaataacaattgagctaagaagagttgtgcaatgtatgatcatgtacaactctttttttgatggctttttcgctttaacaggttgaaatcttccgcaaagtgcgttattatagtaacaatccaaaaaaggaaagggatctgcagggtggtttcctgcggaaaaaggaaataagaaaatggaatataaaattgctttgattcccggcgacgggattggaccggaaattgtaagggaggccagaaaggttctggacgctgtctgcagcaaatatggtcataagtttatttactcggaggttttattaggaggcgcttctattgacgtacacggagttccgctgacagaagaagcagtagaaactgcaaaggcttctgatgcagttctgatgggttccattggaggggatgcaaagacttctccctggtacaaactggaaccgtccagacgcccggaggcagggcttctggcaatccgcaaggctttgaatctttttgctaatcttcgtccggcgtatctttatcaggaactgaaggcagcctgccccctgaaagaagaggtcattggagaaggctttgatatgattattgtcagggagcttaccggaggtctttatttcggggaaagaaaaacagttgaggaaaatgggataaaaacagccgttgatacactttcctataacgaaaatgaaatccgccgtattgcagtaaaggcctttgacattgccatgaagagaaagaaaaaggtgacaagcgtagataaggccaatgtgctggactcttcccggctctggagaaaggttgtggaagaagtggcaaaggactacccggaggtaactctggagcatatgctggttgacaactgcgccatgcagcttgttcacaatccgggacagtttgatgtgatccttacagagaatatgtttggcgatattctttctgatgaggcgagcatggtaacaggctctatcggaatgctttcttcggcaagtctgaatgatacaaaatttggtctttatgagcccagtcacggctctgcgccggatattgcaggacaaaataaggcaaatcctattgcaactattttgtcagcggcaatgatgctccgctactcacttgatcttgacagagaagcagatgcagtggaggcggctgttcagaaggtccttacagaaggctaccggacaggtgacattatgtcagagggctgcagaccagtaggaaccgctgagatgggtgatctgatcgcggcagcggtgtaacagaaagaaaccggaacagaatcaggaattatttgccggatactgaatttacagaaaagatcagctgcaattaccggattttatcttacagaaaaaatcagtggggctgatctgtcttacgacatagaagggagaacatacacatgagaagtgatgcagtaaaaaaaggttcacagcaggctccgcacaggtccctgtttaatgctcttggatttacaaaggaagaaatggaacgtcccatggtaggaattgtaagctcttacaatgaaattgttcccggacatatgaatcttgacaaaatagtggatgcagtaaaacagggagttgccatggctggcggaacccctgttgtattcccggccattgcagtctgcgacggcattgccatgggacatacaggaatgaaatattctcttgttacaagagatctgatcgcggattccactgaggcaatggcaatggctcatcagtttgatgccctggtgatggttccgaactgtgacaagaatgttccgggccttctgatggcagctgccaggatcaatgtgccaacggtatttgtaagcggaggtcctatgcttgcaggacgtatccacggacacaaaaccagtctttccagtatgtttgaagcagtgggcgcttatgcggcaggaaatatttctgaggatgaactgacagaatacgaaaacaaaacctgccctacctgcggatcctgttccggtatgtatactgcaaactccatgaactgtcttacagaggttctgggtatggggcttggcggaaacggaacgatcccggccgtttattctgaaaggatccgtcttgccaaacatgcaggaatgcaggttatggaaatgtacagaagaaatatccgcccaagagatattatgacagaggaagccattctcaacgctctgactgtggatatggctcttggctgttccacaaacagcatgcttcatcttccggctattgcccatgagatcggcatggattttgatatcagctttgcgaacagcatcagtgaaaaaactccaaacctctgtcaccttgctccggcaggacctacttatatggaagatttaaacgcagcaggcggcgtttatgcagttatgaacgagctggataaaaaaggacttcttcatacagagtgtatgactgtcacaggaaagactgtgggagaaaacattaaaaactgtgtaaacctgaattctgaggtaatacgccccattgacaatccatacagccagacaggaggacttgcagtcctgaaaggaaaccttgctcctgacggaggagtggtaaaacgttctgcggttgtggaagagatgatggttcatgaaggaccggccagagtgtttgactgtgaagaggatgccattgacgccatcaagggcggaaaaattgtaccgggagacgtagttgtaatccgttacgaaggcccgaaaggcggaccgggaatgagagaaatgctgaatcctacttccgcaattgcaggcatgggacttggctcttcagtggctcttattacggacggaaggttcagcggcgcatccagaggagcctccatcggacatgtttctccggaagcggcagtaggaggacctattgctctgatcgaagaaggagatatcatcagtattgatattccggcactgaaactggaagtaaaggtttccgatgaggaaatgcaggcaagaaaagagagatggcagcccagagaaccaaaagtaaccacaggatatctggcaagatatgcgtctatggtaacctccggaaaccgcggagcgatccttgaggtaccgaagatccagaaataatgaaaaaaatgatctgttataaaaagaagtctgaaaaatattttacaggtatcataaaacagcaacagttttacaggggatcaatataagattgaagagatataccggaaaatacagagggaataaggaggagacgatatgcagctgacaggcgcggaaattatcatagaatgtctgaaggaacagggcgtggataccgtttttggctatccgggcggggctatcctgaacgtctatgatgcactttataaatacagagatgagatccatcatgttctgacctcccatgagcagggagcggctcatgcggcagacggctatgcacgtgcaaccggaaaagtaggagtgtgtatggcaacttcaggaccgggagccacaaacctggtaaccggaatcgccactgcatatatggattctgttccggtagtggcgatcactgcaaacgtaggaaaacctcttctgggaaaagattccttccaggaagtggatattgcaggaatcgttatgccgatcaccaagcacagttatattgtaaaggatatcaccaagcttgcggacaccatacgaaaggctttttatattgcaaagagcggacgtccggggccggttctggtggatgtgacaaaggatgtgacaggggcgctttatgattattctccccgccgtccggcaaccgtaaaccgtgagacaagcgagatccacagggagaatgtggaacaggcagtaaacatgatctgcaaggcgcagaaaccgtttatttttgttggcggcggttctgtgatctccggcgcatcggaagaaatcgcagagctttctcacaggattcaggctccggtctgcgacagccttatggggaaaggcggattctcaggagaagatccatattatacgggaatgctgggaatgcatggaacaaaaacctccaatctgggagtcagtcagtgcgatcttctgattgttctgggagcccggttcagtgaccgtgtaaccggaaatgcaaaaacctttgccaataaagcaaagattcttcagatagatattgacgctgcggaaatcaataaaaacgttctggtggatgcttatatagaaggcgacatcaaggaagttttaagaaggcttctggaggaaattccggagaaaaagcatcctcagtggatggaacatattcaggagatgaaggcaaaatatcctctgaattacgatcatacccagcttaccggaccgtatatcattgaaaaactttatgaactgaccgacggagatgcaattatcactacagatgtgggacagcatcagatgtgggcggctcagtattataaatacaaagaaccgagaacatttttaagctccggcggcctgggaaccatgggatttggtctgggggcagctatcggagcaaaaatgggaagaccggaaaaaactgtggtaaatatcgcaggtgacggatgtttccggatgaacatgaatgagattgcaacagcagtgcgctgtggaaaaccacttgtgcagatcgttctgaacaaccatgttctgggaatggtgcgccagtggcagactttattctacgatcacagatattcgcatactgtattaaatgatgcagtggattttgtgaagatctccgagggcatgggggcaaaggcaatccgtgtcacaaaaatggaggaagtggaatctgcgcttaaagaagctctgtcttctgatggtccggtggttttggactgttggatcgatcaggatttaagtgtatttccaatggtgcctgccggggcaaatattgatgatgtctttgacgaggaggatatgaaaaatgagcagagtgtataacttttccgccggaccggctgtactgccggaaccggtactgaaagaactggcagaagaaatgatggattatcagggctgtggcatgtctgtgatggaaatgagtcacagaagccctgaatttcagaaaatcattgatgaggcggagcaggatctgagagatctgatgaacattccggacaactataaggtgctttttttgcagggaggggcatcacagcagtttgcaatgattcccatgaacctgatgaaaaacggggtggcagattatattgtcaccggacagtgggccaaaaaagcttatcaggaagcgcagaagtacggcaaggtcaataagatcgcatcttctgaggataagaccttttcctatattccggactgcagtgatctggatatcagtcctgatgccgattatgtgtacatctgcgaaaacaataccatttacggaacaaaatttaaaactcttcccaatacaaagggcaaaactctggtggcagatgtttcctcctgcttcctttccgagcctgttgacgtaagtaaatacggaatcatttacggcggagtccagaaaaatatcggacctgcgggaatggtgattgtgatcattcgtgaagatctgatcactgaggatgtccttccgggtacacctaccatgctcacctacaagactcacgcagacgcaggatccctttataatactccaaacgcttactgcatctatgtgtgcggaaaggtatttaagtggctgaagtccatgggcggacttgaggagatgaaacgaagaaacgaagaaaaagcaaagatcctttatgatttcctggatgaaagtaagctgtttaaaggaacggtggagccggaatcccgctcactgatgaatgttccgtttgttacaggagataaagagctggatgcgaaatttgtaaaagaagcaaaggcagcaggctttgtaaatctgaaaggtcacagaaccgtgggcggcatgcgcgccagcatttacaacgcaatgccgaaagagggagtggaagcccttgttgcttttatgaaaaaatttgaggaggagaatgcgtaatgtttcagtatcactgcctgaatcccattgccgaaagaggcctgaacatgttcagtgaggattacacaaaaacagaaaatatcaatgaagcggacgctgttcttgtaagaagcgccaggatgcatgatatggagcttggcgattctgtaaaggctattgcccgcgccggcgccggtgtaaataatattcctgttgatgcctgcgcggaacagggaatcgttgtttttaacactccgggggccaatgccaacggtgtaaaggagctggtaattgcaggaatgctccttgcctcccgcgacattgtgggcggcattgagtgggtagccggtcagaaggacaaggaaaacattgataagcttgcggagaagcagaaaaaacagtttgcaggctgcgagatcagcggcaaaaagcttggaatcatcggcctgggagccattggagccatggttgccaattctgctactcatctgggaatggaggtttacggctatgatccgtatatttccattgacgctgcatggaatctttccagaaccatcaaacacagcaaatcccttgatgagatctacagccagtgcgattacattaccattcatgtgccgcttcttgacagcacacgcaaaatgatcaacaaagaagcctttgacaaaatgaaagacggagtggttcttttaaactttgccagagatcttcttgttgatgaagaagcgctgatcaatgcactggaaagcggaaaagtgaaaaaatatgtgacagattttgcaaatcctcttgtggcaggccgggaagggatactggtaactcctcatctgggagcttccacagaggaatcagaagaaaactgtgcagaaatggcagtaaaagagcttcggaatttccttgaaaacggaaacattaaaaattctgtgaatttccccaactgcgacatgggaatctgtgtggcagtgggacgtattgctatctgtcataaaaatatccccaatatgatcagccagtttaccaagatccttggcggagagggcgtgaatattgcggatatgacaaataagagtaagggcgagtatgcctatactcttattgatctggagagcacagtttcaagagaggcgcttgaagaacttcgtgccgtagagggagtatccaaggttcgtgtggtaaaataaaattgatttgcagaaaagggtcttactgaaaaagtggggcctttttttgatcagatttaaaaaacaagctgtaccaggaccatgtatagaattgtccctccggcaatggacagcagcatctgccgtttccacaggtggagaaacaccactgcaagaatggacagaaattcagggataccatggctgccggtaaaaatgcttacgtttttcagacagtagaccacaagcagtccaaacacagccggagggagaacctttcccagatattgaatgtatttgggagtggcttttcctgccgggaaaagaagaaagggcagaaaacgtgtcaggacagtcccaagcattaccattgcaatggtaatgatctgttctgtaagagtcattggttttcacctcctctggtcagaggcgtccggagaaaggtcagcatggcaaggagcatcagcatggcgggaatgatgaaacggtccggaccgaaaataatcaggcagataagagaaagcaaaagcccaagaatagaacaggtatggctcttttctttcatccattgttccataaagattaccacaaacatggctgtcatgacaaaatccagtccctctgtactgaagtgaatcagagaaccgaagatgcctcccagagtggcgccggttacccagtaaatgtgattatacagggttacaaaaaacatgaaccagcttcgatccacatcttcagggatttctgcggcatagtttatggaaaaactttcatcgcacataccgaagatcagatagaattttttcagaccggctccctggtatttttccagcatggaaataccgtaaaaaagatgacgggcgttaatcatcagagccatggccagtgcctgaacaggatggaaggcgcccagaagaagatttacggtaacaaattcaatggatccggcaaaaattgtcaggctcatgagcatgggataccagaagctgaatcctgaagcattcatgtaaataccataggtcatgcccagaaacaaaaaacctgtcagaataggtatggtgtgaggaaaggcacaccgggctgctttttttatggtgtgcctttctctggaagatttattcataatctgttccacggaaaaattactgtctggatgcgataaattccagaacttcttctctggacggcataacgcgaagcgcgccttttctggtggtgatcagagaagcggctgcgttggcaaaggtcagaagctcttttaagttttctgcagtcagatcctccagaccatgctccagaacatagttgagagcgcttgcgcagaaagtatctccggcgccggtagtttcaatggtgttttcctgaaggaaaggagcagcctccactctgagatccttgtaataagcgcggcttccgtcttttcccatagtgataagcaccagaggaatgttgtatttttcgcggatcagggcagcgcctttgtcgtaatcagtggttccgaaaagaaattctacttcattgtcagaaattttcagtacatcgcattttcccattccgtattcgatctctctgcgtgcatcgtccagagaattccacagaggagggcggagattcggatcaaaagtaatgatacagccggcctcttttgccagttcaatggcatgacgggtcgcttctctgacaccttcatgggtggaagaaagagtaccgaaatggaaaatacgggaatcttcaatcagttctttctgaacctcttcctttgtgagcatcatatctgcgccgggatcacgataaaaagaaaaatctctgtccccgtccggataagtatggacaaaagcaagcgtagtatgatgcttatggtccatgatcaggttgcgtgtatcaattccaacttcctctacagccttttttaactgatttccgaacatatcgtttccgactttgccaataaaggctgtttttttgccaagcttctgcagcatggcaaggacattgcagggagcgccgcccggatttgcctccatcagaggattcccctgagcgctgtcgccgttttcggtaaaatcgatcagcagttcgccaagtgctgttacatcgtattttctgtttttcataataaacctccttaagtatcttgtgatccacacagactcctgagctggcaggaacagaccggcaatctgtatgttttcgctattatcaatttagcgtagagaatcaattttgtcaaacaaaattcggacaaatctttattttttacagtaaaaatggtaaaataacaatattacagattcttttgcaggggagaatccatttgttttagataatggagagccctttttgccggaggaatcagtcaggaggttggagaagatgaacggaaaagcgtatgactatatggactggccaggaattgaagcgatcatatacggggaggaagtatctccaaaagatattatggctccaaggctcactccggacgggatactgctgcagggctttttcccggaggcagaaaaggccgaggcggtgatagagaaaaaggcatattctatggaaaaggaagatgaggcaggatattttgcagttcttgtgcccggaagaaaaattccttcctattctttccgtgtaacaaaaaacggagaaacaaaggagtttgaagacccttatgccttttctggacagatgacagaggaagaggaaaaggctttttgtgcaggagtatattatcatgcctatgaaaaaatgggcgcccatgtgatgaccatagacggaacagaaggaaccagctttgccgtgtgggctccaaatgcggtaagcgtaagcgttgtgggagattttaacggctgggacggcagaggtcatctgatgcacagacggcccatgtccggtatttttgaactttttattccaggagtaaaaaaaggagatctttataagtatgagatcagaatccggggaggtcagaaggttctgaaagcggatccctatggaacctgcacagaggcttttcccgccacagcatccatagtggacaaagctgccggagacattacctggacagatgatttctggatggcggagcgtaaaaaatatgcggacaggaatcagccggtatctatttacgaaacggacctgactcaatggaaaaacggggaagaacttgtttcctttgtaaaaaaactgggctatacccatgtggagcttcatccggttatgggatacctggacgaagaggcagggccttattctacattctcttactatgcacctgaccgtagatatggcgtgccggaggattttgcccgtctggtcaatgaactccataaagaaaatatcggtgtgatactggactggactccggctcattttccgcgtcatggagaaggactggagcgctttgacggaacacctctttatgagattccggatccggcaatggcagtccatcctatgtggggaacccttctttataattatgaaagtccaatggtaaaggagttcctgatcgccaatgcgttttactggacagaggtgtaccatgtggacggattccgtgtggatgatgtggattccatgctttatctggactatggaagagagggcgaaagctggcgtccaaatctttacggaaccaacgaaaacctggcggcagtagaatttctgaagcatctgaattcagttatgaagaaaaagcaccccggtgttcttatgatcgctcaggaggacggactgtggccggagcttacagatgatgtggaaaacgatcatattggttttgactataaatggaacaataactggaccagtgattttattcattatctggagctggatcccgttcagcgtcagtatgaccatgatcagcttactttgtccatgctctatgcttactgcgagcattatgtactgacactgggaacaagaagtgccggagagatcagtgaatttatggataagcttccgggcgatgagaaacagaagcttgcccagataagagctgcctatacgtatcagatgcttcatccgggaattaaaatgacttctccgggtaaagagctttcccgggaaatggaaacatttttccatgatctgaatgagctttactgttctcatcccgcgctgtggcagaaagaccatgaatatgaaggttttgaatggatccagctgataaagtatgaagaaaatgtactgacctttatgaggaaaacagaaaaaccggaagaaacccttgtagcggtggtgaattttgcggcagtaccctatgaaaactaccagattggcgttccttttaagggtaaatacaaagaaatctttaacagcgaccgaaaagaatacggaggtatgggtgccggaaatccaagggcaaaatccagtaaggcagaggaatgtgatgagagagaaaattctctgaagatacggattccggcttttggagccgtagtgctgtcctgtacactggcagaaaaagcagaaaagaagccgctgaaaaagccggctgcccgtaaaagatcaacagcaaaaaaaacatccaaaaagcctgcggcctgaaaaaagaaggtggcgaaaaatttggactttcaagattgtagcccctgttttctgatgatataataaaaaaggcaaggagaccgctttcatgttaaaaatgatgatccgcatggatgatgataagataacgacagagaaaaaataccatttggacggtatttacagtacaatcaataacacattccttacagtgggactttctcgtattgaggatggttctggtgcgttagtatatcgtgattgtggacgggcaagggatttcagcctgtttgggaaaatagtcaacactttgaaaaggcagacttggtttatggataatgtagccgtttggcgtttatatgacagtgatgattccgacagctccgaaaattttaatgaagaagatctgctgacccattacagagaaaaacaggctatgagggcttgatcttttggagagaaaatattttaaggcactgaatttttgacagaattattaaaaccatcagaagacattgtaatcgacgattcacttctgattgctccatccgaggaaccaacagaataaggatacatatcaggcaggacatgaaaaatgtcctgctttttgggctctatgtcaagttttggggtgggattcttaggaatctcgccccgttactgcgtttggagccttttttacatttttaagttctatacttatatttgggcatgaaaaataaaccttcgtgccagtcttgtttataagtttctatttaaattgtcgttcatctcgttctatcttcataacatcacctgatataattttacatttcatgtgatattatttgaacgattataaatttcatacaaccgactatttatttttataataagggcaataaatttgacttccgtattttaattatacattcattctctaaattcattcaaaaatattttgaccgctttattaaatcctaaaatgaaattttaggaataccgaaaccattcaaaaatatactagtcacatatagtataaaatggtataatatatttaaaagaggagaatataatgcagataaaatacaaaaagaaagctgtaaaatatattaattcagcggacagtcctacaaaaagacgtttacgggaagctattgaaaaaataccatttggtgacatcaaaaaactaataggtttcgacaatgaatatcgtttaagagttggagatttacgtgtgttatttacgattgaaaatgatattgtaactattaacgatataaagcccagaggtcaagtatataaaaaattataggaggaaaaaatgagtagagagactataaaatatttgattgatatgatccccgaaaaagacattgatacaatttatagagttttagtgcgttttgttcctgagacagaaccacttccggacgaaatagaagcaatattagaagcaaaagcagatacatctccgacaatttctcataacgagattaactgggattaaaagcaaatttataaaagttttcaaaaagaacaggttttatcttgttctttttttatactcaaaattaatgtaaaagcaggcacagaaaggagaacaaaatcatgaaaaaacaatgaaaacaatcgaacttagaaaccacctttacaaaatggcagaggacagcactttaggatggaaatactcttccgatcacaaagcttacatggaaatgattgattatcacaccggaaaagtttatgcactggagcatgatgtattcgatcaagaatactcaaagggaagacggttaatccaggtgaaattgcaacttttcaggatgtgcctgttattggtgtttttgatatgcggaatgtagatgaacctgatatctggggcaacgcaaattatttgaaatacattcgtaaaaaaactttgacttttcaaggaaagattgattatctcaaggataaacttgctaaaataggacaagcgaaatcacagtttgcttttcatgtatacgagcatgtaaaggaacaatgccccaacgcagatgcaacttttaaggaaaatttaattactatggtgggtgtaccgggattccatttgcttgaagaagctggatatattgaactgctttcattttcgcccactataatgcttaagacttctttcatgccatcttcattgatttcaagtaccacatatgctgccagcttcctgatcacaccatcatcccgtacagagaagtgcacagcatcaataaaaacgattggatacacaggtgacaaaggacggttctgccattcctcgatttttggaaggagcttatctgtgatatcggataccattccttcactgacttcaaacccataaatatcctctatggtttctgaaatctgccgtgtagtcatccccttggcatacattgcaataatcttatcatcaatcgcagaaatatccttttgacgttttgggagcacttgcggttcagaagaactttggcgatcctgaggtacatctacttcgaattcaccgtatttactacgaacagttttagactttgttccattacggtaattaggctcaccagatctttcataacgatcgtatccaagatgattgtccatttctgtttcaagcatatcttgaagggctccggaaagcagatctttaagtgcctcctgaatatcctcagctgattggatatcgtattcctggagtagtccctgaataagatttctttttccttctgtcatcggttttggtttgtaaacttctttttttctgtttgccataataaaaggcctcctatgatttaatatattttatcatagaagacctttatagtgtttaatttacagagattttttcacaggctcatttgcttatcagccaatctataaccatcatatcctatactttcccccataatacaatcttcgtatccatcataagtagatctttttacttccgaaaatttttcctttttgagccatttaagtattccaccgccgaaagtctgagatcttacttctttgcttttgtctacaatagtttgtttttaagacttttcttagcatctttatacttttcgtaataagcatcctttttggcgttgatttctgcattggtttttccgtagaaatagttaccgtttacatctttgtagaatttatatttgattccattaattgttttggttccccatgaaccttctccattttttcttcgacttgccattgcatcatacctccaatcatccaaaacgtatgttcgcaatagctgattagttttttaattttacttgacaatcttatatttgtgcattaagataataaatgtgtttggagaacacgttgtacttttaccataactataatgaaaactatggtaaaagtaaatagggtaaaagcaggaaagaaattaccatagttagaataacattagatggtattataaggtacagcgaagtaatacttaaccagttggaaaatctgctaaaaacccttataacatgcggaaataaaggaaaatctttgatttccgttgtcacaggctggaatagctcagtcggtagagcacttcactcgtaatgaaggggtaaatgtattgaaaaatgctttaaaatcaatgcatttcaagctttaaaaaaacatttaccacaaatagttaccataatccgagccgcataccgattggtagttaaaaaatagaggaaattttatgccaagaggacaaaaacgagttgtgaaactgtcaccagaaaaaatcagagaagaaattgttaatattgacacagctattactgcaaagaccgaagaaatcaaatctttaagagtgcaaaagaaagaattaattaaagatcttgctgttgcagaaaaacaggaacttaaagacaaagaagagcagcagatgaaatctctcgttgcacttatgaaagaaaaaaatttaactcctgaagacatagaaaaaattttatcagaagctaaataaagcaaatgaaagttaaaagtaaaaaaatgggacatagtataatttgctatgtcccataaattttatgatcagatttttgtgtaaatactgccatccggatatcggatttccaatgcttcaacttctggtttaagcttttcatgaaagatatcatttcctcctgcggcttcatagaatttacccatttccataaatgtttttaatgaatcaggagtaataaatccctgtttgacaaattctccgtgtaagcgccacaaagaagctcgcaacgtgacaactgtacgttcgttatctttttccatgtacttctcgaataattcagtgagtttatgtacatcatcctttaaagacagttgttcatttctaagttcttctcgtacttctaaagtttgtccatgatattttttttgcttattgtaaaagttatctgcatattcatctaaacgctgctcataattctgtgtacgtttatcaattctttctacacgatcagacagtcgattgatacgttcttcctgttcttttttgtataaatcattttttgtagtcaatccaaaagcctttaatgctttttgtattcctaatactgtcaaaataatcaatgatgctatcagaataaaggagagtatagcttcatactccccaattttatgtatctcctgtaaggtttctgccgcagcaataaccataacatattcaccagtcctttctattccgtcaaattatgatacctttttgatatagtcgctgcgaacatatccaatatattttccctggattcgtactttataccaaactttcccatctgtccctttcttagaaccaagaacatctacccggtttgttttatcaagctgtgaccattcagcaataggggcataattagttcctgcattctttctaacatttacatcgtttccagtacattctccaacaaaaggatatttagaagcagcaggggtagagttgagtttatctggtgttacaatacgagatttgtcaatccatccaatatatttatttgcgatcctaatctgatatctgtttccagactgattaataacatctacaagattaccacgattcagttttggatatgtaccaagcttatcattgcctgttttagttgcgtatacgaccgtattatcggttgtgcaagctccaacgaaggattcaaagcctgaaggtttgggattgcttaaagaggcaattagagcgtctagtttattaatagtattttttcctgctttaccatccacttcaagaccatattttttttggaatcgcatcacggactgctgtgttgcagatccaaattctccatcttcttcaagttttctacctgcatcatctttaattccaagcttgttcagtttctgctgaagagcttttacatctgcaccagaatcaccaatttcgagatatcctttagatggagtgataggagtatctgttgaggaatttacagaagtaacaatagaataatcaggtctacagaattttgttcctggaagattagagttggaataagattttttacatacaccaccaccattatctacaataccagaagctccagatgtgtttccttcaatagtccagaatttatctccctgtactgctgtaacaataccagtatgtgcaaatgttccaccacgataaaagataacaatatcacctgcctgcggatttgcatattttgtgaattttgctccaagagtagggcagtatacataaggccaatgttttaaaagtttctttgcagtatcaagtccaaaagccttcataaatatccaagatacaaatccggcacaccatggttgggcctgataagatggagcaatatccctccaatatttagtataattgttatatccggcatttgcagtcttactgtcaagttgtgcgttagtccttttttcaagatagccgatttctccttccgcaatcttgatcatgccattaatcgcttgttctttcgttatcattggatttcctccttcctgtggttttgaattttcacttttataatctttatagaatacgtttctgtctacttttgttgggattcccggaatagtagcttttgagctatactgccatccaataccaaaatcaggacgtaatctttcctgcaaatctcctgtatcatttgcagggtaacgagcaatccagccatcgtattttcttaacttttcagtcagaacattctgataccagtccacattgcaataaataccgactttatatccggctgcctggatcttgttcaaaaatgctaaagcaattttttcaattgcagtacttcctaatttcctttgttctgaccactccaaatcaagaaatacaggaaaatttaatttccgtttatttaaaactttgataactccatcagcttctcgttctgattccgctacagttttagcgtagctgtatttgtaaacaccaacagggattccatattgaatgcagcctttgtagttttgctcaaatgtactatcaacaacatttcccttttcagtgattctcaaaattgcaaatcccatcccgtaatcagcaacagttttccaatcaatatccccttgccatgaagaaacatcaattcctttgatttccatacttattcctccgtatttattcataaaaaaaatagagagcctatctccagactctctacatgattcacttaatattcaatttgttcttattcagttttctttgtttgctttacaatctgattggcatatgtactcagtcctgccacaagaataccctgtacaattgctgtaaatactgccatggcaatttcctgcatagtacctagtggacatgttgcaattacatatatcgctgaaagcagacatccacatgcacctaagatatacgggatatatttatcctttacagtctgtgcatgttttagacccatacccaggaaatataatacaatgactaatactaaaagttccggttttacataattagtaatgatttgttccataataaattcctccttttatgaaaaataaaaacatctatccgtaaaattgatagatgttttaaattatagttatttattattaagagtgcttatgtgatttaccatatgcctcttttatgcgtatataattttcagtcatttgctgttcatccatatataattcttctgctaaatcgcaatacaaataagatgcttcatatttaattttagtatttttaaaagttgtttgttcttcaacaagaactgtttttacatcgtgttcttccatacaacacatacataatttttcttcacttttaataattatcatatgaaaattctcctttttaaacaaatgaactgatgtttatatgatatatttttatctcaattttggcaacacaatattgtttacttttaagtgaataacatatataatattacataaaatatgtatgaataggagcctacatatgttagataataattcaggaattatccccgtatccgtaattgcatcttttaatccatacggacagataaaaccgctatattttcaatacgaagataaacaatataaaattacttctgtcataagatcaaatgaagaagtaaccaaaattatattttcttgtatttacctggatatggattcagagcttgagaatagaattaccctgatatataggatacgagatcagatatggggaattgtacgtgaattttaaatttatacgcctaagacatatcttaaaacataatatccattttcgtatttgattccagaagttccagttccggattgtttgttagtatcatttccacgaatagtagaatttcccacatataagtatttgtttgccataactccaaatgtagccgtacccattggaaaatccattccctttccactatgtttattgacatattctttaggtacgaaaaatgtgctaaatccccaatccgctgctgcaccgttttcgtatgcagaaaatactaaaacaataccatgtggttgatcagttacatattctttcagagaacaagtgtgttcgctactgggccataatgctccagcccataaaactttattttggaaagtgtcagtaacagaaccgcatttaaacccctgagaagcttcatacgtaccagtagttgccgttggtacattagcccagttgccatcacctctcataaattggcttatattgttgtttaggctacgcattaatccgttactgtagtacgaagataatccatatgtagtattggtatcttgcccaggtataccgagagcagtaatgtcacttttggtaactgtggttgctgcagaaacgtgaccagttgaatctacggtaatcttgtacaaaccagaatattttgaagaatatgtaggatgactataataatttgctccggatgatatgccatccagtttatttttatcattagaagacataagtccgtctgaataatagcttgcaataccatatgtggtgtttgtatccgggggaacttcccatacaccatcacatctcaaatatctgtttgctgatccggcttttggagcaggagcgtatccggcagatccatcataataatatgtagatccctgtagaggtgtccatgtattagtgtcctgacttggaattccaagtgccgtgatatctgatttggagacggccgttgcagaagaaatatgacctaatgaatcaacggttattttatataatcctgatgtttttgaataataacttggatgagtataattgtttgcattgtatgcgataccattcaacttggacttgtcgcttgaagacattaggccattattataagtgtctgccaaaccataagttgtattggtgtctggtggtacagaccaagtgccgtctgagcgtaaatatctattagctgcgcctgcagatggagcatttacaaaaccagatgatcctgcgttagaactagtggctccttgaaaattactatgagtatggtttgcatttgccttttcagatagtttgctatttacttctgtctctgtaaaatatctgtcatcatgtatatgtattttgcttgcaaatatagtttttagctttgcaagaaatgtcgataatccagttttgtctaaaaatttttgttcactcaaaatatttccctttcttgcataaataaatcagggatacaacattacagatgtacccctgggattgatagtttcaaatttgacattaaacaaacagagcatcaatttcttctgttgtaattgctacataggtagtgttttttaaattatcaacgtcagtacgtaaagatgcaatgttattcttgtttattgttacctgtccagcggaaagggcatttactttagattctgcaacacctgcggcatcaaaagcagtggtagcaacatatgcagcacttccaagtcccttaacagacacatttgtaccaccaactgaaatagtaccatttgcggatccggatgtgatacttgctttctgaagtgctgtatcagctttagcaccttgagcagctgtagcgtaattttctgcaagtccatcagcataagattttgcagacgctaaagcgttgttagatttcgttgttgcatccccagaagcggtactgatcgcctgagatttggcagtctgaacttctgttttggttgcatagtttgttaagtcaaccttggagtctccaaccttttctaatttctttgttcccgactcattaacaaccatatattcgtcatatgcattggttccatctggagatgattttttgatcatgtaaattgtatgttcatcagcagcggatgcttcaggaagttgagttacaattgttctctttaagtgtcctgaattagcaatagctgatttaatagcagagtctgtctgtccctttgtataagcgtcaccaataccataacctgctaaagttgtagatttgtctgcttttcctgtttttaatgttgcgatatcattcttgttagttgtaacctgtcctttttctaaagcgtttaccttagtctgggcggttcctgccggatcataatttgctcctaatccattagcgtaacttttggcctgttgtaaagtagtagcatcttttgaatcaattgtacttttgattttcttgtcataagatgtaagtccagttaagtctaaaaatttttgctgtgccataataaaatttcctcctcatataatcaagtgttttctattgaaaattcaaggtttttcaacctttcatatctcagtgaataagccacagctatgagcatttcgatgtatcaggtactgaaatagtggttagagggtatacgaaataaaacgtcattgatttccgttttactggccttgtatatacccatccctctatggcagctaacctcctatatccaccaggatcatctctgtctccagaggtcctaacttccttcgtcctgcctgcccataaccagggtgtcagctatgctccattacagggtcatgccctatggaaaatattcctgccgactactggctcattctttgtattattgattactgactcgcttcctgttccagcactgtgatcagtggacgttatctgttacattctgcttaattcagtggctgtccacgtgacagcctccattatagttacttgtctttcttatgcagcctgtagataaactgccggtctcttgatgtcactgaccatttttttcggatcataatccacacctttagtcagcatcgcaaaaaagactcgtatcagcttggctgcaatcgccataagtgactgcattttcttcaatggattcagccttctggttgtgtaataattatgtagttccctgaactccgggttcttcgctacaagcgacattgcaacctcaaagagcaggtatctgagtctctttcgacctcgtctgcttattgttgtctctcccttgtgctttccggaactgttctcaaccaatgccaatcctgcaagcttctgcagttctttcggactgttgaagcgactgatatcacctacttctgcaaggaatccggacactgtcttgattcccacacctttgatttccagcagcttttcagccatcggaatctgttttaccagttcttcaattagaaccataacttcctgtagacgcatatttctggattcatagtcctcaagaagcatccggatctccattcttgcagatactgctccttctttgcttccgacgctgtgctccgcagcttcgatcagggtcttcgccctcgcctttccaactgctctcatctttgcatcccgccagatctggtccactccatcgatacccaacgtcaggatatcttccgggagtggtgcctccttaaggatcagcattccgctcttggcatccggctttccgtataccgtcttatattcaggaaaatatatattgaaccaacgactgatcctgttttggattcttgtaagttccgactgtaactggaatcttatgtttgatgctgttctgagatcagcataaacaccatccggcagatatgggatcatgtatcgtccctctctaaccagacctgcaatcactttcggatccttacgatcattcttagttggattattgtcgtcgagttcctttgatttcttgacatgatgtggattcacaagtactggtttcatttcattatcctgaagatactttccaagattaaaccagtagtgccctgtcggttccatgcctggaaccaccttatccttctcatgtttttctttgaggtccaggatccattccttaaatgtcacaaatccggcctctgtgttactaaacttaaatggtttctttgaatactcaatgcctctgtagtcaaacgcccttgcataatgtgtttcacttcctacatcgattccgattaccaaagttttttcagttattgcttctatttttttattctgtgtgttagacttcattgtagatacctctctgttcaataagatttttactaacctgccagtcagtagtcttattgtactctgaggtattttcaattttcaacatccacattttttattatacaggaagctccatatttttataaaaatagcgaggaaatctcatcctcgctgatccgttgtgttttatctgcaataatctgatatgcttgatcttcatcattccatacagatatagtttcattttttttatcgacatacaatgttttggtttgtcctaattgaggcaaggacaaaccaataaaaacaacatcttctggtggcgtagtaatttgaatccatctcgtttgatatgtccataaaacagccgtttcaacgacaaagtaaaaagctccagaaataggagctaaaatagacaccctttgttcgtcagtgtcgatttttataatttcattgtaaaatgttcgcttgccatttatgtctagggcaatcgtttgactgtcctggacaaagattaattgaccatttttgatacttaaatcaggcaggcgactttttactgtgccaataacagacagtataggctttgtatccattcaccatgccctcctgactttatttaaaattcaatgattgttaaagcgtcatctgtatatttctttgcttctcttaaagcgttgtcaatctgacctgcaatgtctgcaccaccagaaccaacagttttattgacaaattctactactgttgcagactctccaagatcaccaaccttttcattaagttttgtatctatagactcttcgtatgcagtagtgatttcagatttagcagttgaaattttggtatctactgtagtggcatccacttttgtatttacattgtctgtaattgtcttaagcttgctttcaatttctgttttattgtaagcgtcttcgataccgtatcctgcaagtgtagtagccttatcagctttgccatcaactgttttctttaacacggctacttttgactgagcatccgcagcggcagtagcaagtaattcggcctgtgtcttgtcataagtgtcaagttttgctttgttagcatgttcatggactttggagattgcatcattaagagcagtcatattaatcttagatgatttaataacctttccagtagcaccgctgaacactacgatttctccatctacagaagaatctgcacctgtaacagcaccatcaatatttgcctgaagcacaataccatctgtattagcggcacttccagaagcgtaatcttttgtaataagaattacatctccgacttcacatttttgtccaagatatgtacctgccagagccactacatatttctggcctgctttgtaagcttcacttgggaacgggtgatcaccatcaataacgataggaacctctgttttagcagcagcaacaattgcatcagcatattcctttgtagcaagttctttcccttccagttttactgttcctgtaaaatttggatttgcaatatttgcttttgtagaaatatcagtttctaatttaccaattctcttttcgaaatcagcaatagaggtggaaacatccgcaaataccttaacccatccagaaccattccaaatataacctacattgttttcaatatagataacaccctgttcctgtccggattctggtcttgttcctacctgtacatactgctttacagcagacgcatctacgccaataggttcaatagtacagttgccattttctccctgcagaacaaatgctttatatttactgcctacttttgcagtaataatctgaccgctataagcgttaggctgttttgcataactctcggcttctgcctgggaatcccaaaccatagatgcatctattggaagaggattacctctggaaaacgcttttacagcaactaataaagatttagattctatagccatttttattcctcctttgaaattttatttaaatagtgactttaaatgtcattccggcagcagcaggagtagccatagaatagctgtacactttatatgactttttgccgttttcatcaccacgagcatcagcaacatctaccagtgttttagtaaagctacttgccattccggtgtcgtttgtctctgtgtacatcacctgggatacatctctaagagttgcagggtatgcaaagataacatactgctgaccgattgcaataggaatgttaaatacggttccctgggtaggattaagtctcttattagttaaaccacgaacaacatcagatgtcagagaaggtgttgctccaacaccagttccgtaaaacatatttctgcgtccattaatactataatttccagaagtaacacttcctgctgcaatgtgaccattcggtgactgctgaccaaggttgttatttttaattgccccctcgttatatgtagcttttgcagtaaatgtaactgtttcgtccccgattacaatagcttcgcccgaataatcataaggtgtagcagttccacttcctacagactgaccaccttttaatatttcaagttttgttaaatcacctgcatcgttcttattaaatgttgcacgtaactttggagtaacagatgttcctgcctcaacatcgcctgaagcactacctccattatttgcgattgacacagatggtttggtgtaagtagctgggattggtttctgtactaacattttaacaatttcatccagtgattttcctgcagtaatagtctcattgttgccaattccaagaccagtaacaccattcaccttgatgtctgtctgggtacgtggtgtattaatcactgttttcttgttagcatcaatccaaccaacttctccattgtctaaacacagaaaatcatattcattgattgttccagcttcgacagcggttccgatatcttcttttgcaccaaaaccaaatcttgatttcttatcagccatattttatttcctcctttaaaattttgtataaaaaaagaaccttattataaggctcttaattcaaactgaagtatttaattaaaattctattacttcataggtatctgaattctttttgctagaaaactccaccacatcatattgatcatctccggaaccagaaccgctacaatcaccatatcctagttcgggattatatgcagtttcataaggtttaacggttaaagtaacactactggttctcatctgatactttttcttttcaagagtatcagtttttaaaaacgtcagatataatgttacatctccggcagcagtagataattgactatcaatcggaagagtataagagtagtgggtatcattatatgattctttgttaatatttaaatcctctgatcctgagacattgccagggagaatatatctcattttcactgtgaaatcacctaaatcgtgacctttatagtccttcggaattagaaactgaagcttatcaatcaaagattccccttggtacagtgtgattccacagcttttgatcaggaatttatttttatccattacaatactgtacatagattttcctttcttttttacaattaaataggagagtagtataagaccacccccctaatgaaaccaatatttcgtgtgtataaattatttttcaactatttcaaaatagtgccctataagctgacttggcttaaaagtaagggatactttctgtccatacatagactccggatccggcactcctgcacgcttgcagagataaatcttagtatcttcaagatagtattttccatattcgtattccattgagctgactacttcaggaacaataattggattgtcgattgtacccttttcggagtctccgttaatgatatcccataatgcaggtacaagatcaggagtatgctgtgcctgtgaggtgtgtgcctgtttacatatataaagtgtatctttatataaccgtctgtcaccaatttcgtatttggtatcggctttccatggatcgtaaagatatctcataatataagcttctttatcagtagcgtattttaaagcaagatcttcctgaatatcattcaaaagctcattacctttattgatattttcttctttttctttttcctttaaatattcatcatatttttcctgatcgaaagctacataaaattcattgtcttcttttttatatgtaaggaaatacccattgattttagacaaatccacaatgggatcagttaaaatcgcacgaatataactgtttctcagtctttcgagggaaatattcagaacaggacttgaagtgttatacacatctacatatacttccatattaaattgcctcccttcattaaacatttacagccccttgataggatggctgatcttttaaccaatcataagcattggttagtaaatctccggataataacggaaaagcttcgctccactcaatacttaaatattctgaatttgtataagggaaagaaggttcacctacaatatttccagcttcataatctttatcatattggcggccttcttcatctatataagatcgtaccaatagtgttactctttgattgagttccacgctgatcatagcgatcatatgataggagagaagcacaccattatcgctttttatttctacttgtaatgccataatttattcactcactttctaaaaaaatagttttatactccaacaacatattgtaaagcatatttgttgttggtatatttaacaccgttagaacctgtaccagactgattattatttgcatgtcctcttaaataagtatcgtatatataaatatattttgtagaaaaatttgtgcatggggtatgagataggaagaatgaatgtccttgaccttgatgtgagctaatttccttttttgatacgaaaaatgtgtgccaatctgcatttagagcattaccatcataccctctgaaaacaagtaaaatcccatgaggctgttgagaaacaggtttagagaagttgcatgtatgcgaatcactgggccatagtgctgttccactccacaatacattattttgaaaattatcagtggcagatccacatgtaaaaccttttgaggcctgcatatattgctcagaaataatagaatgattagtagtcatgtctcgtgaacttatttcgaaattgtttgattctcccgttccgtcattaattgaataatttgcactatccgtatttaatgtaaaagaactgttgccgtgataatcagaatggttactgattgtatattgtccataagaaaaatcactataatcaataactgtcattatagttgcttcgtgttcatattgaggatcattgactcccatatatatttcaatacctgatccgtaacacataaatcgtgtttctgtaggtatatctctccatccagatgaagtttcggatcttacttgaactttaccgtttcctcgaatacaagtattttctgagtatatatcaattcctaatccatgttcttcatcgtttactgcactgatagttccaacaccatcgcacattttaataacagaatttttatttcccttgcctaattcgatctcattttctttaaatgatgcaaccgtagtagtaccatttcggatatttactccatcacttgcaatcaaaacattgcttccgtaagaaccttgtgaaatatctgataccatcacgccgttataatccatagtgatgtaattcgttgctgttttagctgcatttaaaatatcacttgccatggaatcaagttttgattgtaaagtatcgtatcctacaataatctgatttgcacttaatgtaccagtgatattagcagcaggaacctgtaaacttccattcgagatattacatcctccaataattccagaagtagcagtaacactgccttttagtttaacatttccgtaagtgtcaattactaaatttttggaagttagcgaaccatttaaaagatttaaataggttccttgttgagcgtatccatcatcataataacctggcgcagaataattttgagatttgattgcatctgtagacaatttagcagtggtaatagcacctgaataaattttatctgaagtgatagaatttgatgcaatctgacttgaagtcaattgtcctgtaatatttgcagatggaacctgaagtctgttcccagatattgtacatccaccgataataccagcatttgcatttactgtgcctgtgaatgaaccagaacttgcatatactgttcctgaaaaagatccggagcttgcataaacagctccatatataatagcattacttgcttttaataatccattcgaagaaacttggaatccattagaaccttgtgagacatatccaagagttacatccttttttatgtacgaggaggatcctgcaacattgccttcaggaattgttacattacttcccaatgtcagagaatttgcaacaatatcacccgtaaacgaaccgcctgtggcatatacagtacctttaagatttacgttaccgtattgatctacaacaaaatttttggaagtaatagaaccatcagataggttataaaaagttcctgcctgtgcatatacactattgtgtccaggcgcaacataattattggattgtaatgcatccgctgtaatttttcctttttcaagaacgattctttttccatcagggctttttacaataaactgatttgtcactgcttctaatgcttttgaagtcaatgtaagagaagaggaactggaagaatctgtaactaaccagtatattttattggcaagctgttctgtctgagatttattatagtaattacttgtaaggtttgcatttgtcgcatatgtattttcgactgttgtcttgaagccatttaaactttgttccgtttgtgaaatcttattagaaagagtttcaactgtagaaccatcagctttcttctcaattgtagtctgcatatctttaactgtttggttaaaaccgctaagtgtctgttcttgagacgatacctgatcacgaattgattgaatggttgtattattaaaagagtcaacggcagtattaatatcacttacccatattttatttgtgatattcccattgattttatctaccagagaacttatcccagacattgtttttatagtagaatctatctgagattgaagatcctcttcggctactttccaatcagtaggcttatttcctctttccaactgcggtctgcaaagcagtatatccattttcttacaagaaataataattaacagattgtttgtggtttcattgtaatcatcaggaacagtaaaagtaataaaccttctttgaaatcttatggaacttaatccatcattgattccatcctgattgtcgatccatgttatttcagttttgtcatagacttctttattttctttgttggtataataaatatgtgcaataaatttatctgttaaattatatgttcctcgtacagctatagaaaacgtataagtctcaccaattttataatctattttctttgtattaaaagcaataccactattgatatcaacatctccaccttgcgttacgatatgaatagaatcagtcaatttatcaacagtattcgtcattaccgtcttccaacttttccaagcccagttacgctgatcatcgttatatcccataatactgcttgtgcaggttaataaattcttacctccaatttcaatgtcattcgcaatttcccaactggagtcacatgtaggggttgtaaatgttgttgttttatctgtatatgtgattttaaatcttgtccacaaataatatccgaacatccattttttaggtttgtcagcccatcctgacacaggggattctgtactgctttgactgatagcatattcaggaacaatggataccacaccttttccgtcatgaccagcagcaccagtaatacatacaggtttgcttatttctggttgttttgttggatcagtaaatgttgttactgttctttgccaataatatttaccatttgaccaaggaggaatatttgttgaccaactaccgcctattaactctgtattagaactggaaagataatattctgtgcgaaaagaggatactgcattttcgataatgttggatatatttacaaaactatatacttgaaaattcatagtttgtaagttcctccttttttatatattatttttcagtgaaaaaatccaagaaatctaaatcatccatattaatatcaacttccgctatatcacccttttcttccaatagggcaatttctttattaacatcaataggagtcatagttacagttactttttctgcggaaagttgtaagagttgagcgattaaatcttcgttctctttttggaaactttccatatattcttttttcacttgtcttcctggaacttctttttcttgtccgttttcatctgtctgtttaatagtagtctcaatactcatttcatcagaaaaatatcggtcattaatttcctgccttttttctgtacgaaactcattataagaagccgttgctttatttaattcatcaatatttttttttaagttccactgagttgcaagtgaaaatacattgaatttattttttgtatcctgattttctctgatttttttataataagaagcaattgtgtctgcttcgaaaatagtcatttctttctcaaaagtttttgccataatattctccttttactcacgtatctattttttgtaaataaatacgagactgtattttgacagcctcgtattgtataaaatataaacaacatttattaaatttacttatcctgtcactttacatctaaactgcatttctccctgaattatatctgggtcaatataaatgcatctgtctgttttgtatggggcagttgtatcaagttcaacccccttggaatttatcctgtaatactcatatttcagtgtatctttttcggtagcatcagcccatgcagaaccattatatttctttaatgtacatgtttttgcgcttttatttaagtgatagtagaaatctccagaagatgctccgacaggggcggtggtagaaaatactaaagttctaatgggatcaagttcttctccatttctatatactcttgtataaattgcaccttcgccttgtccgtttttgaattgaccaactgttttgtaagtataagactgtactggatcagactggtcaacaaccgtccaatatgcatcataattgtgtccaccataagtggcagtacatttaaaccagcttgtaccatcaaccatggacgcagaaacaactaaagaattactggtttgtcctggaatggtagtatattttcctgactcaaattttgaccatacaaaagcagtaggagttacaggtgttgcacctgacatcatcatagtattaattgttgtagatcctgctccgttaataattgtaccaccatcaggagagtataactggaacagtattgcattctgtccatttgctgcttgtttactctttgtccacgtaaatttgtgttcaatactaactccctgacatacaaatgtaagagtaatatctccagtcattaaagaggaatttccgaatgttgctccggcagctacggcaagagtcagtaaacctccggcattggatgtacctgctgtattattttttaccgtcacaccacttggaagagttccaactgtgcatgttacaggtacacgggtaataccagaaaaaccgtagaatgggatagcgatgtcttttgctacagaagcattaccacttgtattacatggaataacctcagagctatttgttacaaccacagatacaccattcgtacctggtctaccatcagtaccatctccaccatcttttacaacgacaattgtctgtgaatcgagcaggacagtagtagcacctgcctgatataaggaacatttaattgctgttatattatttgcagaaggtgtatatgtttttgtgtattcatctgtcccactggtgtatttaggtgtaaaggtagttccgtttgtagactcctcaataatgaatcgtccgttataatttgtttttgttccactggaacctacttttctataagctgtcaaagtaatatttgctggattgaatactttatttttatcaagattgattgccaatacattagaatctaactgataaactacagcgtctgcaccatcgctacctgcatactgttttgtaatagtgtatcttttgataatgcttgcatagttacttcgtgtacatttaaattcagcataacttgcatctgtggttaatgcagatggttccataatatgcgttacaggatcataagttgcagtcagtccagctccgtatgtaacagcgatattccatttagaagtaacatcttcaccaccttcatagatagtaatggatgtctcagccccaacccaactctttacatttcctttagagtcaacaggtactaaatggttttcattagataagatagcactaactgtatctgtacctgcagcaccatcataaatcttgtaaatttcatgcaaatcataaacactggaatcgttcgttaccagtttaataacagcatttttgttgtttaaccaaatatttgcttcggttgccagaacttttaatgttgcaccagaaattgatggattgttggttgtagggaatgctacaaaagatccgtcaggttttttatactgccattgagatacgctgacatttgttagatttgctgtaagcgtaattgtattgcttccaactaagtttcgatttgtatcatatagaaatgttgattctccggatataaatgcatctttagtatttgttgcatttgaaatcaaactataagtaagtgtttctctagtagttaatggaacacctacttccggatctttatatgtgatattacatatataggtaagcagcttacttgatacagaggccagtttgtttgcacttactgtcaatttgttaccagacacggtttcacctgcagttaatccgacaggcgttccggaaccctcctgacgctggaaactaacagtaagtccaggtgcagtcaaggctacattttctccgttataagatatcaccggagttattaccaagtttgattttccccagtctggggtatatgtattttgattagggtcaaaaatcacagaattaggctgattagatgtcagatacaaactaacttgaccagcatcagataaatctgtgatagtgacactagaaaatgcccgtattttagccatgtgtcaattctccttttatttataaaatttattacacgaatttgcttacagagataccgtctgtttcaaatttgcattcaaacattgctcccttgtatacatcattagatgtcagtagcaatgttttggttccttccttatgtgtattattccaatttatgtctccgtcatgatcattggaatgtcttcgccaagtaaaatatttattatcccaatcggttgttacctctattgaatttttaaataaccttgcgtttaatattaatcctgcaggtgtcatacgattaccatttggcatttcgatatataattcatatgaggaagattcatcaattttttgattcatgctattaatatcgtttgtcacagtttctttgaatgttgtatattcaacaccaaatttgcttccatcacccagatatacttgagagatatcaataccaccatgttcatttggctcaatgatttgaaaaccaagtttatctttttggatagttccatttgcaagcatattgtttacgataatattatttgggataccatctttcgtgattccgttttcatcaaacatagcagtctgcccatctttgccacggacaataaaattaaaatttccatttccgtcctgaccaatctgaacacggacattaccattggaatcatagaattgttgagtggaatctttaaaagcaatcgtaggctgtccatctttaccgattaatgtgataagttctgccgtggcctggtgtgccataagatcagcaacagacatttgagaagcaatcaattctttaattaccgctttatcaataactgcattctgtgttgttaaatggatattttgaatatcaccaatacctgcaaaaccagaaagaatattttcgatattaccaatatttgcactaagatcactggtcgcaatctgattgtttacaaagtcaataaaagttttcgaattttcaatacctgtaattttatctgccttaatagtagaagactggattgtattatttacaaaatctataaatgtatttccatctccacctgtaataagttcagtagatattttttttacatcaataactccgttaaccatatcaataaagttctcaccatttggcccaacaatctgttcgacagtgattttatctattttaatatggctgttgataaagtcgataaaatctccattattaccctgaataatttgtgcggagataaattccgcatcgatatatttggaaaataactcattaaactcggctttatcaccaacgatatgacctacttctactttgtaatttttcaggtattctgcgatcagacgattgacggttgcttcgtcaacctgacctaccgtacctcctgcaatatcaccaactgcatgttggaataatccgtttttaatcataagttccaaaagggcagtgaggtattctttttctgaatcagaatctccagtaccgaaagtaaaactgtttttggaaccacggttattctccatttccaaaagttctgttaaatcggaacgtccagaacgtgaagtgatcatatttgaaaaatccagtgtaagatctggggtactttcgcatgggttgcgtgtgattccaataatacgcagctttacgctgtaatcgtcacggatacctagacgaataaacttcaagaggtcaatttgacctttccaatgttcaaattctgggatctcaaataagttatccatttgtacggaaaaagtatattgcggttgagacacttcagataatttgcttacagaatcttcgtacaactctaattcacagtcgatttcagtacgggtagtagtaagagaggtagaaaagatattagaattttgatagtctgtatcatgaaaaagacttctaatggtgatcagatcagaagaggtaaatccaaagctgctatgttcaagacttgcctggcttgcaagattatttcttgaattattgatctcttcaatcttatcatcataaaccttttttttagcttttctttcttccaaggctttgtttaaagcatcaatatgctgtgcagcctcgttatactgattatgataaatgttataattctcttcattggtaaactgtttcttttcttcttctgtcagttctgaccatggctttttataatcggacagcttttcaattttggtgttgtattccttttgttttgcttccagttctgtgataccataaagatcccagttggtttcccagtcctttacataatcttccttttggtcttccggaagatccagatttttaagggcgatctcaatgtttgggataatataatgaagagtatcgtagtaagtataatatccaccatatccattgcttaccttttttaactcttccagataacgatcatgatcaacactgccatctggttttttccatggttcatatcctgtatagtcattgccatcttctgcaccatgccagttggggtcaacagatacctgtaagctggttaagagagtattataatatttcagacttccttccagtccttctttattcatttcgtcccattgatctgtatataaatcatctgcaggaacacgattctgtaactcgctggaagcttcttgattgtcagcccattgctttgatagatcaatgtattcttctctatgtgattccctgtattcaatccatttcttgacctttgcaatcagctcttcggacatatacgggctacgcataaagtaatcaagattaaaaatatagttatcctgatagtttacattacggatatttaactcattatctccgtgacagttaaatctggtaaacacagaatcttcattgacacttacatcaatctgctgagccagattacggtatgtgataaacaccgtggattcatattctttgtcatccagattatcttttgccagtaccttgatctttctgtgcatggtatcaaataaaaaaagacattccattcttggagcaatcgtagaaatacacaaattatagagtgttacattctgttcctcaatggaaggcattttcttttttattagccgtacatcgatatcatctaaatcatatgaccatgttggaatttgctcaataagtaagtccataaaggataactcaggtttatctggattacaaaaagtgacaaattcttttgcaaatcccatttcattaaggttcccagaagctaattgttccagagagtcttttgcaccagtattgattttaaaatttatccagcttttatcttcaaattccttttcaagagaataggcaactacagatttataagatttctgaccatcaccactttctgtaggtttttgaagctggtacattccaatatcttccaaacacaaagtcatgtataaatccaactcatcataaccgttggatttcactttttggtcatttacaataatgtattcatctacatcaaacgtaagctcgccaatatcttttacgtattgattcaaatttacagaatcagtctgaataccatttaattgagtgatcggctttaagttaagatcgcatagataaattcttttatttccctgtatcataaccatccaccaacccttttatgtggataatcaaattctattgttacctgcacattaccttccactctaagagtgttttgtcctggcagaagacgaggccagtaaatatttcctacatcgtcccatccaagatcctgataggtaataatgcctgacgtagttccatctttcggaatacagtgcagacaatcaaagatcattggaatgttacggcgtgtctgagctgtcattttattggaattgtccgtgacattggtaatagatacagaagcagtagaagaggaagattgaacgattgttaggatcggatatacatattcccccaattcgtctgtctcgcagtcaacagtgatggttccacttgaattaattgggtacgtctgtttaaaatgttttgtcggatatgctgtgttgtttttgaaattaaacatcataccagcccatccaccgccgatcggataccattctgttgaaatgaattttccatggtaaattccatcaataggatttccctggcagtcaattaccgtcaaatcctgtgatatctttggcgaagtaagccacctttcgataattctctgttcttcagttgtgattgctgcatgatcttttttgataagaccatactcaatttcaagtggttcatattgtgttccatattcatttgcaataggacgagagatggtcatttcccctgtaatgtcttccctctgatgtccagatatagaatcaataccatcaaatgtacataatatcaattcagagctgcttaaaatatcttttgtagatttcccattatatataaaacctgccataccatccctccttttttattttatataagaaaagacactactccgatgaaagagtagtgtcctgataaatgaggtcggttatcaaccaaacctttttagatttttccgcatttcgttttgtgtatatttactagcttctttgcaaatcgtctgaagatctggcaatgttgatttggttacatctccttgaacctgtaacatcggaccatcataattgacatttacaatgtttgtactagacttattaccttctgtagctttcattctaaacatatcttcatatgttgggaaattcggattgcgccagaaagcagccatatcttcaagtatttcattcatattgtttggagttatattatttggaatcactccgtcattggatttaatcccctgcttggtaatgacaatctcatgtcctctgtcattagtgaccgcaagcacatcttcaccaacaagttttcccttccgatattttgacatatctgacacatcaagatcaccctgagtaatacccatatctcctgcattgattccaaactgttccagaatctttgcaatcgaattaagagcatccgcagtattacctcccacgtttgctacagcgtccgcaatagcctgtgacattttatcaaggtttgcactcatttcatgtgaccatttctcgaagtcctctgataactggtctttgagatcgtccagtccatctacctgtaattcgtatacatgatctctgactgtatcatcaaaatcttcctgtttttctgctaattcagcttcaagccttgctttttcggctctggattgtgcatcagtcaccccatccaatgcatcaatctgctgttttaatagattgatttcttttgctttattcttgattgtcttatcataatcatagtaatctttcttcttctgaagagcatcttttctggcatcaatgaccttaaataatgcatcctgttcagcctgtgcctgatctttgataataccgataatagcctgctgataagcctgtgcatcctttaacgcaccttgcagacttgcatcattctcagccatcagcttatcataagtttcttctccaaacttatctgccttgaaatcatccatgatctgctgacgcttcttcacataatctttcagggtagtaagagaagtatcaagctgtttggcgttcaggacaatagataaagctccgaactcggttaaatgtccggtttcatagtcatacatcatatcttcggtaataagactgttgattgcttcgatcttgtccttaaacttctcggctttctcaatcgctcggtcaaacatttcttcgtactgtacaagaatctgttcctgtttgagctgttccatttgattctcgtagtcctgaacggctgtctgagcatccacaatctcagatttcatttcaagccattcatccgaatactccttaatggttcctgcttttactgctttattaagctgttcctgtagctttttggcagcttcctcctgatgtctctgtgctttattgatctcattgatcggcttgtcaaagctctcagaagtagtgtagtcaccgtgggtcttgtcgtactcacgctgtttgtcataaagcttattccatgattcctgatattcaatccgctgttcatagtatttcttgatattatcaaattttgttttctcagcttctacctgtgcctgtgcatattctgcctgagactgagccgcatttgcagcagcttccgcttcggcttcctgtgcagcagtcaactgttgtgtggcagcagtgtaactattcatagcgttctgaaggtcaatgttatactggtcaatgatctttttcacgtttgcatttttgatattgtccgtattgatcttcttacctgctgcaagctgtttttcctgatctgcggtcagatactttgcatacttcttactataggatttacctttcttctttacagaatccagtttcgatttatagttatctttacgcttggtagcagtctgggtattctggtttgccttacggtaagcggtattctttgcatcattctgctgtttcagaagagcaagctcctgatcgaccagataattctgataggaaagagaatcacccttatcatatgctttctttgcagcttcccagtttttcttgtattccagatagattgtgtcattggtatgctttgcatcattggcagcagtataatcctcacggacaccctttccataagaaacggcattttgataagctttcttagaagaattactcttttttaaagcagcattatatttttcaacaagtgttttctttttacctttcagtccttttgtgctgagacttaaaccggagtttacacgttttttctctgcttctgttaaggatgcaccttttttcaatgcacttgtagcactatttaaagatttcttgtctgcatctgcgactttcttggttttatcttccttattttggatactgtggagtctgtctttctgtttattaaattccgcatccgttttctttttgttattatttgcatagcgcatggtattatcaagctgtttcatcagaagagactgtgcggaacctcccattcctgcagtttccaaacgtgcctgaatcgcagcaagtccattatagctctgtgtcagcttgtcaattttcttctctgcttcctctgttggaatagctgcccattgagcatacagctcaacctgttcatttctcaactcacgcactgcatcaatgcatttggtatattcatcatagtaattcatatacttctgcactttgtcatagtgagccttaccggattctgtagaagtatcgatatcatcaagagtatatcttccttcttcaatcagctttctggtttttgagcttagtcctagtgactgggctttgctgtaatacgctcttgcagcccggtaattgacatgcatttcactgttggtagcatagatctgtttttgtaacagactctttttctgtgaggatgaaatataatcattgatgctgtcagcaatcgcttttgttttgtcggcaaagtatttcaacctgcgttcaacccagtcaaatacctgtgtggatttcttggctgctttggtattgtcattggtagcctttgtattgctgttgactgcgcctgtattgttgttataggaagtggtattggaatgtgtggaattgttggaagatggtttgttgccggaaataccgccttgaggtctaaatgaagatcctcctgctgtataatgagcaggcgatacaggaatagaaccgtaatcacctaatgacccttgggcaaacgctcttgcatgtcctgcaattttaccatgttctaataaagctttggtttgagctgccgagaatataatatctccctttttaagattttcgaaatgtgcgccacctggaatcagtgaccatacaccatctctaacgatggattcaacaccaacttcatttactaaagctttttcatcgttattgagagatatatctcctttggcgtgagcagaagagagcggtcgcatattaaggacattatatgctgttccatctgcatgagctatggaagtggctgtacctgttgcacctgctttttcacttctgctaatgtgagtggtagtaatcgttacagatttgtcatgtaaggaattaatggaagcgcttaatgcattaactgctccggttccagatacacttgcacctactgatacaatcttaccatttaatgaatcaatagcagatttcaactcacgtacttcatctgttccttttacgttggcttttgcaataacaattttacctgacagatttgttatggctgcttgtaatgctgcaacctctgctgtaccatcaacatttgcagagacagaagcagaactatcattaactccgcttacatttgctgtggcatctacaacaacttgctggccgtctgctccttttgtatctgttatattagcggtagcatcaacatttacttcctgtccatcttcgccttgcgtgtctgtaatgttggcaatcgcatctaatatagatacactggcaggtggatttacagatgttatatttgcatcaactgagatatttttcttttctggagcattctgaattttgtctaattcacttgtatcaccagtggtctggatttcaacttcctgagtctgaggctctggatccggaagagggtctggtttttcgagttcagttggaatttcaatagattctccggtgatggcttcaatcaaagcattaaattgcgtattatcaatctctacagcaaattgaacgttttgctgatccattgtctctaattgctcacgaactgtttcaacctcagaagcatcgcagcctactgtggtcatcaacttctgatcagacatagcgagaagttcatttacaactttagcatcgtctccaccttcattttcaataacagttttgatcttttgtgtaatctcttcctgttttactttgtcgatttctgactgggcttcagatgtatctgcaccaactttgattttgtattcctcagaagtatcatcgagaatgtctttttcaagactatccagaccggaagtgtcgaatactccttcagtatctgctttcttaaaggtttcaaaagtggcctcggcttgcttttgagcttcctccatattatttttcatacccttagcagcaaggtctgcctgagtatcatattcagctttagcctctaaaaaattcttagtggcttccgctaacggagtgctagcctctgtctgataagcttctgagttttcgtattctgctctttgctgatgagcaatagcagaagcgtatacatcatgagcttcttgagcgccttctttggaataatcatattttggagtaccatcttcatttgtactcagatatggctgaatctgctctgttgcgtttttgacctgttgttcaattttctctggatcttttgtatctatatctatttcgtattttgtgccgttcatctcattcagtttttcctgagatgatttagccttttcatctaattcgtctaaatcagttgtatcaacttccggcttaagaatacctacaccttccagagcgagcagtaattcatctctggtcaaacctgtagccttcgcaagatcctcaagagcatcctctgcagcttccataccttctacgttataagctccgtctccaagttcgataccttttaactgttctgcattataagatgatagcgcatctaaagctccctgagtggcttcaccattttcttcatgagctttcgttaatgcacttaaagcgttctcatagttcttagcatcttcggaaccttcagcgaatcccatttcctttgcagtcttgggaatttcccaagtggcagccccagttgactgaagagcctttgtataactttcatcgctgactgtataatcatcttcgttataccctaatccgtattcagcagatttggatttgatctcatctttaagtttttcagcggtttctatgtcgccttctttattcagccgttcaatctctttcccaagagtttcgatttctttcttggcattttggatttctttcgcacgtttagctccgatattggtggtccattcatcctctgtctgttttacctcatccaattgagaagtatatttatcgatttctgcctgctgtgcttcgatagcagattgaggagcgccctcagcttccaactcggctttctttgtaatagcatctgcaaattttgatgatacatcctctacattctgagaagcttcttcggcagaagacgcaaatgagttgaatgcgcccatatcttcggcacgtcctaaaacagccataaatggttcaaatcccatacccatttgtagagccgcttcttcagcatcagagaaatttgttacccattcctgagttccgtcctctaatgttcgtaatgtagcaagacctcttttttccatatcatcatagaactttaatactccagaaccatcctctgtaaagtatcctgagattctatcataattttctttgaaattcaccggatcttcaaagccataaggagataagtattttgcgacagatttaaagtcatctgtaccaatgaaacctttatcccatgcttctttagcagacttaatatcttgcattacagatgtatattcatccccggcatttggcgtatttttagaattttggatattttggaaatcagaaaattgtttcatctgctcattgtagatagcactcatctgtgtctgagcacgtttcatattttcgatattttcctgagcctttttgaagttttcctctgcggctttaagttgtcctgcattggattcgtcactattgaggatatcttgctgtttttttaattcttccgtctgttttgcgatacgcttgtcaaggtcgctggttgcagcttcatgctgtgttttaacaagtctctttaaggctctgtcatttatctttacaccctttgctgtattgataaataatccagatggatcatagttttccaaagtaccaaaagcattattcagtccttgaatagactctgatgttaaacctgtattagtacctgtttcagacatgacagaagacacagcggagagatcactttgatatttgctaaccttttcattaagctgatctatagtgagagcagcacttttggcttcttcttcgccctctacggcgatagtaaatctccattctaatgtatcaaaatcccattgagagatgtcaaattcattatcacgaatataatcatagaaagtctgtaaatcttcatccgatttaccagacataaaatcattccatgttttttgttttaattgagactgaattccttctccgaagaatttatcttcaagaacttctttgagtttttccatattataactgtctggatcagccattgccataatatgctgtttgagatcatctgttgtaacaccaacatcactgagatcatctgtgaaatccttatttttagcaattaatgcgtcaagagaatcagatccctcttttgcagcagaaatcatttcttctttgaggtcggaatattctttctttgcaaattgagtttcaatattagattttaatgttttacctgatttatttagaatatcatcatattgtaccattgtagcttccagatcttttaactctgttttctcggattgggtaagaattccaagatcttctccggttttatatgcctgatatgttttctcaatggttccaatataatcattgatataaccttgtacttcagcaagctttgagtcgattttgccagaatactcatttaaagcattcatttcattttggattttctcctgtttatcagaatctttttcatcatcaaaacttttctgcaacaagtcattttcttgtttgacttttttctgtgattccaataatccatcataagcacctgcaagatagttgatattgtcagcgttattcttaggatcaatagaatctaaagaagcaccttcgtagctatcccagatgtcccaagccgctctatttgcgttctctctaatcttggcaatacgatcagcattgccgtacatatctacgaacttctttgattcctcagctattttgcctttattataagatttatctgtttcttttcctagtgcatttgcaaatttgtcaccaagaagaccatcataatcttcggtcgtgtagctcttatatgtatcttttgctttattcagtgtttctctggcatccactttattctgtgattcttgcaatgaaatactgcgttccaattcagcgtttgtctctttaagcttactaagttcgtcttcctcaacaagtgagagatgccctttaaggcttaactcttcgatacgagcttgagtatcagctaattctgtattgagagatgcaagtttatcctcattcattgcatattcttcagtcatttcattaagttgttttgcttttgtggaaggaagactgtcataggatttcttgatcgcataacctgcaccaccgataagtgctccgatacctaaaccttttactatatttagaggcgttaaaaaggttttaactttcttccctacattaagaaaaccttgaccgatagctttcagaccttttgtacctttgagagaggtattggacataatatccattatatcgtcaacatcttcgagtacatcaccaaattgagatgcttgtagtccagccttggccattcctttttcaataccggataatcctaatgcctgaccagctccttcaatatctccttttcgatagaaatcatcgatcaatgcagcaatacctttgtcattattaccaactttggcgatttctttcgcagcgtccttaacttctccactaaaacttgatgttttgagtgacttaggctataatcaaattaacagtttctatctattaattttgtacaagttttaggaggagagattatggcattaataaaatgtccagaatgtgaaaaagaagtatctgacaaagcagtttcctgtccgaattgtggttatcctataaatgacttaaaaaatgatattttacaaccagacgttaaaaataacattatggtatttgaaggtaaaagatataatttgactgaacttgtcgaatatattaatagcttatcagaagaagattatagaatagatagaaaaactaaaagagaaattggatcgacacaacgtaaaattctccataaattaataccatctatagatataagcggagattgggagttgattcactatataagaagataccatcatgttccggatttcaactatataccaacaggcgatccatggtactatacagtagagaaaccaaaggattataatcataaagattactggtattacgagaaagacaaacccgactttctcaaaccacccattcccaaatgtccaaaatgtggttctacctctatcagtacaaccaatcgtggatattctttctggtctggtttctttggttctggaacaccaatgaatgtgtgtcagaactgcggacatagatggaagccaggaaaatagagagttgtatattagataaactcatctctatgttccaatttttttaataattttttggaatgattttgtggatacagttcgtcatctaaagcaataaaatattttagactataattgcacagctttagtgacagtttataaactatgtctgtgatatgccacatacatagattgtacatacgagatattttattcaataaaattcacctccaggttcaatcgatattaacttgtataggtatttaaacaacaatccattttaaaaacaggtaagattacatgaaaaaacaaaaagtcgataaacagctaataaatcaaccggattgtaaatgtataagaataatgcttccttccggtaaagaccagataagatatacaagatatctgacgcttgatgattttagacaacctcgaaggatatatatatttgaggaaatcaaaaactataaagggttgaaaatatattgccgtgttcaacttttaccagtcgatctaatgcttcttgaaaattttaaagatgattatatcgaagtaagaagaaaaaagaacggtaatatacgtttgcgaatattttgtgattgcagcaaaatgaatataaatcattcaaaaagaacagagtatatttcctatacattcttaatatctggaacatatacgaacttatattatgaccgaaaaaaatatagcaaaaagaatatacggttgaaagaagaaaaaaaacaacaaagaatctataatcatttatgctataatcctacgataaaaaataaaagcaaaccagatgttaagaccaatatttatgcgtcagaatggaacgcgtctcacccttacagtggtggaggatgcagtccaagatgatcccgattatggaggatgaatcatgtatcattacacgtttggtagtatatttatatactgttattataacgatgtgaattttgctgagttgatgggagaagtgggagaagagcgagagtcatatttagaaaatactcaattcgtctctaatgataagtcacgtaaattaatatgttcaatagaagcagaattaaaccttgtatgtaaaaaactcgacgtatcaccaaaagatgttatattcccagataactacattgaatggttactcgaatttttggaagacttacaatcttggattgaatgtgatcatgtagaatttaccaaagatcaattacgttgggatatcaatgcttggataatggaaaaagaaataggagaatttcttattgacattgttagatatctaaatgtggacactttacgatatgaatacaacatttcaataacagtttggggttccaaaatcacatttattggtgatttaattggaaatgggtttactatatacgacagtataataagcggccatattaagagaatcactaaatttttagataaccttatagaaaatatggaggttaaagattcagatacagatgagattattgctgaatccagcgcaatcctcgactttaaaaacgtcattgtaaaaacgtctttccgtaaatgtgaaaaagataatcatgatacctgtattcgtaacgccattatttacatcctcaataatacgacacatcaaatcgtgccggaaacattgccgttattgtactgcaaagactgtaatgtatattacatgtacgaagaccagtatattaccttgaccaaaaaaggaagaattctatgtcgggtatataatacaaaacaatggcaggagagtggacatacaactgatctcttcggttcgctcaatatggaatccatatttaagatatgtggatatagagtagatgcaaattccaatattccggatcaagccagacatagtttgcttgactttataattcagagaaacattgtgaatcttaatcagacattaaatttcttacactggctaatcagcattaagaaagacatgccacatatgcgaaatgcagtcgaaaagtggaaaaatgatctgaattatatcaacaacaagtatcaggaagatgtcaaagccgtaacagtcaaatcaatcaggagatgaacatgatttgtatctgattatagtaataaatcataatataaacatttgagttttaatattatggttggagttttctttcgtgaaatagttttatcataaatgtaatttatttttttcataattataatcctttataagtgggtaaatattgagaggtattaatatgatttcggaatacttaaggttacatgtagaactgcaatggaaaaaatataataaaattgtttgtagaataccaaaattgaataatataattcctgtttctaaggaatattcatggtgtcagtttatagccgatgatttatataatcaaaaatataatttatacattaatacagaacttgaagaaacaccagatgaatttatagaacagactttatttcacgagtttacacatatggcagattctataacatttttatcatatgataaagaatcatttaaaagtattatgaaaatatattctgaaacgcatgcatcaaaaatacaaatggatagaattctgacaactcaaaagagcttatcgctaaataacatggttatacatggtggtgaaataagactttcatcgttcatggatcaaacatttcaacatttaatagatcaatttaacggagaaatatttttaaatggagaagtcagattcgatactaataatttatattattttataggttatctacaatctctggaagagcataaaatcaattatatctattcttatgattgtatacatcctatgtttcaaccgttattcaaacagattacacatgaaattattaaaggaaatgctaattacaatgacttaattgaatatgatagtaagttaaatcaagaaataaaacaatatatttcaaagtcatacaaaggaaggagataattagtatgtctggaagaaacaatgatgatgatgcacatactatggggtgcgctattatcctggttggtattgtatttgcaatgcctcttgtaggtttatatttacttaccagagagtcagaagaagataaaggtataggtgctattctgcttgtattaggaattgttatatggggatatgtgcttacacatatgaattaagttatattatcttgtaatacataatgaataattatcagagaaacattttatcaggtgtttctcttttaatttcctctaaacacataatacatgcagctacatacatatattatcaaaaccaaaacgatcagaggaattttggtttgtcccttcgctagaaaacgacagaaggacagtgccggacggattcaccatcgtagcctgtggactatgcattgaaagtatatataatatggcttatacacactcctgggaagggtagtctctctgcacctcacagttatttgtatgctttctccgaatggtttcacatacgactaatcgtaaaccgtgttggttcgttgttgaccgcagaatataatataaaaatatcatacttttatttcatcttgttacattattgtgtagtcagtaatgtagcggctttctatacgaattgttcccattgtttattctcttgaacccaccatattgaccatatacgccaatatgtatatgtctttatgataggcggctcactcaaataattttaagctgcagtccgggcaaattggaccaaccaaagagagtcgaaataagtccatcttttttgaatagacctttcacgccaaatcctgcagcaataccgcctaatactgtttgcagtaatccaacgttatttacaatgtcaagaatgctggatcctatgtctaaaataggatttacaacatcacggcctgtaccagaccaaacttcttgccatttattttttaactgatcaagatgaccagaaatagaatctaaatacttttgattttcttctaatgcagatccttcagagttctgagaagcttcataagcatcccttaaaatatctttattttgaattatactagctgctatattactgcggttcttgcctgccattaattcaagaagaccgtttaagtggtttgtaccaaactctttatctgttgctacgatttcatcataaatatcagctacatcttgaagaatctcatatacatcacggttatttccgttttcatcaagaatactgataccctcaaaatcattggaagcaacggcagtaaaagccttaaatgaatcattgattttagaagctgtttgtacgatatagtcagaagtatcttctcctgtagcttctaattgctgttttgcctcttctgtacccatcaatcttaacgcaatagtacgaacaccagcacctacagatgcaggatcctggacaactgcgttaccagcagtgattaacgcgatagacttatcaatatctgcaccagcagttacaagagctgaagcagaagtctgaagggcagtagcgagtccatcagtgctgattgagaagttgttaccaacattgtttagcttatcattaatagccatcttgtccatatcccgataagcagcactcatagcaattaagctttcagtggcagcatcaatgctctcaaattcagaaacgttgtacaaaatgtttgcagcctctgctgatttcttggcttcatcaaaagattcgccaagtctcagaaagtctgccgtactttgctggatctgtaatccggttgcaccaatctcatctgcaataccaaaactttctttttgataattcttcagcttaaacagaggagcatcacttactttattcatttcggtaagagcgtcatcaaggtcttttgcaatattaaatccctgttttaaaacatcgaacacttcataaaagcttccgaatgaaagtaagtattgacccaaactcatccatctttgttttaatcctgagaagaagtctcctagtacacttgttgcttttttggtttcagttgttgtagtgctgacaattgttcctatagactcgttccaagtaccaacatatttggaaccattcaatgttccttctaaagtttcagtggcatttccatccggatcaaactttgttggtttgtgagttattttggcatcattgccaagacgggatctgatactttgattcattttttgaagagcttcagagctgttttctgcataatcgtctacatgcttaagtgattgctctagcttatttaaacgagaatcatactgttgtacagaaattgctccagacttcaatttattatctaaggcatctacagcagatgtaacatttgaaatgactgttggcattccagaaacattagatgaattcaatccagccttaaataatgcacctttattaagcgcattagacaattgagtggcagtagtttggattctgtctaattcattgtttgcagaagcaacgccgggtctgtcagatgtctttaatctgtctataatacgatcaatatcctcataagctttacttgcaacatccttagacgcttctgtagctgtctttgctaaatccgatttgattgcttcagccttatcgatagctgcatttatcttcatagcctcatcataggctctgtcaatattttttacatatgtactgggagtttctgagatttttggagaactattatttttcctagactgattagaacttctaacagaggtatttcttttgggagattcttttttggggtcttcctcattatttttgatatcctcattggattcttttgcattctttttgtattcatctaatttttctttctgcttatcaacagaatcagaaacctgatcaatagaattttttaaggactgcatattagacatttctaagtttgcaacctgacttacaacatcctcctcttcgagaaatgccatagttttattatttactgcttctgtaacttgctgaacagcagaagaaagactttgcatagaagaagcctcagcagtagaatcaattgcctttaatatactgatatcagactgtaaatcagattcatgaataggagtggagacttttggtttttcatcgtcttttttcttctttttagaatttttctgttcctgttcattcaatatgtcaaataagttgatctgtccttcaatattatcattggtgttttgaatttgcttattgacatctttttgagagttaataacattatcggatggtttagataggctatcaaacatagccatttgaccatcagattcctcaaatagatcatatttatcttctgaatcttttggcagactgtcttttttttgattttctttgaattcctgtttgtttaatgtatcaaataaactaatctgaccttcgatgtcgtcattagtgctttttatcctttttttgatatcatcctgtgattttacgatttcttttgatgatgatggaacagtatcaaataaagccatttgtccatcaaattcctcaaataaagcacttcggtatttggtatcgacaggggatgtatcagaaatgtcttgtttggcttgttttagtttttcaatttctgataactgggcagcagtcattttagatatgttttgtaatgagtcataatcagcgtctgacatctttaaatacaataaatcttgataatcatcactatcgaacattttttttactgaactaggtattatattatcatctgaatctacgcctaatgcgcttaacctttcagataaaccttctgcatattttagatcagataaatccaatgtttgatttttcttaaatttagacgcgatactttccagttcttttattgcggtttctttatctacagcatacttctggtaagacaagtaatctctttttatattttcaaaggcttgagacatgagattacttgagtcacttttgttttcctgcatgatagggcgagtttcttttggcgttgaaataatttgggatttatcatctaatttaacaccatattgcttttcgtatcgttttttggaactatctatctggtcaaattctttttgtgtttgattaagtgccttttttgaggcagtagagataatatattcttctctatttttttgagctgcttcgagttctttatttaattgtttcgttgttaattcaatatattttccagataactcatggatgtcttgtttttctaatttacctttaaggtttgtggccccaaagttactttttaattttgcttcctgctgtgatatctgatttgcgattgaatttaatgttttaccttgtttgatagattccaacgcatcatctggtgtttttatctctgacagttcttttttcttttttgctaactgctcataaattgataataatttagcatattcttcaacgtcacttttcgcatcattattgttggacagtccgatttctttagataattttgatatattatcttgtgataatgcagagttatataatttccgatcttcgtcagaaaaatcttcgagtattttttcaattgatttagctcttatgtttcttgcttgcgaaacagcattggcttttttagaatctaattcagcttgcttaaaatctacatctgcttgttttctaagcaccgtattcaattctctgtcattaaaatctttcatcaaattagaatctggaatacttagaatttttttcagtttaccaagtgtagattcaaaagcctcagcataatctttagcatctttgttcggatcagcgagaacgccgaatagtccactcatttgacctgaaatattatatcctttaagctgtctgctttgtaatttttggatttcagaagaagcatccagaatacgttttttaaaatctcccatatcaggagcatttacctttaaatctatgtctccggcagatttttctattttttcaatatctttttttacttcattagtaatctgtccaatgttagacggattatatatcgcttttaggcttaatatacctacatcagaagccatacttgttcctcctttttttctatgttaaaacttaattaccgaataaccctgactttttgctgctgcgcttcccttttgagtcaaagcgccagacaaacttcctaattgcatagcagccatagaatatggcggaaatgtatgtacttttccgtgttggcctccagcccatgttcgagacgcaacagtagcagcactccaggaaccatatttatattcatgcattttttcactgcttatacggactccaccatacattgttcttccattatctttaaaatatcgcgaatatgaattattcattaaattttcggttctattgtataaaactggactgtatgatccataaaaagcagaaatagcctgtttagctatttgagggccagcatcagcagccccctttgcatatgttcttgcaaaagtttttaggtataataaaatatcagcttttagtgctgcaacatttacttgcgccattttctcacctctttgttatttcataaaatttccgtatttcataaaagcctcagcaagacttttgatttcttctgcagagagtccatttaaatctttcattacctcatctacaagaggggatactattgcagccatactgtttataacatcatctgcagtctttgtaataaatgcatgtatttcataattatttgtcatgaagtcgtcataacacatctgcatgatagtatcaaatttacccagctcttcctcaggaatgtattttaataaagtgtcaattaagttttctctatccaacatgtcgaattcagcaacacagtttttctctgacatttcaatatttgtatataatgtaagaagagtattaatatacatcatatactttttacaagagttgattttaatgtgacctttattatctaagcaggaaattgaaataatgtcctgtgcatatttctgctttacaagataatctacatatttatctttaataatcatactttcagcatatttttctctaacatcattggatttaagagaattatatctagttacaaattctgttacagtgatctttgcattttcactcatattttagctctccttattatcaaatatataattaatccatgttattttcatggatataaaattcaaactcagtacgcggatgttctttatcataatctgtttttattgtcaaagaacgtaaatgtttcccatcatcatctacaataaagccggactctgtaagtccatctaatataaatttcggtgaataattatcacaatccacccttcttttggtattaaaaaagacagtcatgacaacatcaaaattgtctaactgccggttttccatatgatttagttttatccaaaaacatataaaatctttccatttttgtttcagtgcattcatttgtactcttggaagaatcatccaggtatttatagatggatgccatggtttttctattggtattttcttcgccctggggtgttttaggaagtaataggtattatatttttctaaaacatcattatctagtattaatgtaatcttattcttcatttagataaaactgcccttcaatattataattaaattctgtacattggtattcgggtgcaaaacctgctttgttaatataagtacatgaacaagtgaatttttttacggtttgcattttgtcctttaataccttaatttcattgcattcactatctaagatatgttggtagtgaaaacataattcgattgtatctatgaacgtactatcaaaatatttgccgaataaatcatcgtcattagttgttttaaaatatagagtatcatcacatccattttcattcgacaacgccagataatacctatcaatactgttacatgttacaatatctccattggagaatttcaatatgattttatctaatattaaattcttctttttatccattaataaactccctgtattccaataatattatatttcttttacaagctcatagcttataaccaacggaataataaccagatccgcatgatagtctccggtatcgtggcggtaaaaatctttaacaaactgagccatttttttactggtacattttgtcgcatcacagatatcagaaacaaatttatattctgatttctgtaatttcttctttaaatacattggttctccggaaatagtagtagctagtacataccgaagttcctgcttttccataactctttttaaactatttagattattttccatatttactccaacgtcctattcagccactgttgatacagctctttggtttcatcaataagaaaaatatacacattaatatcttttccttcgtctgttatacttgggtatatatcaataggaaatactctgtgcttaatgtatagatccctctgctttggattcacaatcctgcatacttctttttcagaataaggacgaggatttaagtttgattgaattttcatattccttatactcctaaagtgaaaaaaggggatacaactcgaatagtgagctatatcccctttatataatataataatcactattcaaatacttacttgcctgcatatttcatacgttttggcttttttacattcttcgtttttataagatcttccggaacctcaacaggatcattgttgcgtaccatatcctctgagtttttgtattcttctgttgattcagtagtcacagaatcagagactttttcaaccggaggattcatataaagatgatttggtacagacattacttcatcggtaagtcgttttgtaattttattgaatttatctttatcagatagatcacaattttttaatacttcatatgcctgttccttagataactttccggcattataatctgtaagcgtaagaaagatttttctgcaattttcgctacaataaatagtcatccatctcggcaaatgatcaaattcttcgcagcgattgcagaaggtatatactttactacataaaatacatgttttgttattttttatcatgttgcctccttagatttttataaaacagtggatacgctgtgacacgtacccaccataaataatactcagtttttattattcagtttcatcatcctcatctgcgaaataaacttcatacagagctttattagcagagcagtaatcaacctgaagagatccagagtaaggaagctgaccatctgttgtcagtgagatttcaatctcaggagatacctggaatgaaggtagtacaatatatactgcacgaagagtatcaggatgacaaggatctactgcaagagctttcagtgtaagcttaactgtagacgggaacttgtctgccttattaacaacagatacaccagattttacctttctgttatatttgataatgtacatagtaacgctatcatctgtaggaagggtaacttctccctgttctgtcattgcatacttatcagcagaagcctgagtatctttggtatactcttttcccatagaaccgttagtgttgaatgcgttaattcttacagtaccgtcaacataatctgtaagttttggcttctcaccagctttagctgtgatgattcttggcatttcaattggcgtttcgttagaagcaactaattttccctcaccggaagcagcaccaataatattcaggttgatcatagcattgttagctgtgaactcaccagtcttagctttccagaaacgtttaatcagagcaccagtattgtctactgcatcagtagattctgcactgatattaattgtagcgtcctgaagctgtgttaatacgtagagtggatttccatcgaaatcttcagcaaatccatactgaacacggtcaataacgatatcatctaatgtaaatcccattatttttcctcctttaaaattttttatttgttatatggaaattaattttgttgagaaagttctctcatgaaattaaaatcatccttgttaatttttgatgtatcaacgaagccactataagcccctttcagaagagcagtagaagattcgtaaacctgtaatctctgaacactgtccataaattcaacaatgcctacttcacgtaattcactttttttgtatttaaatccgggatgattaacacaggaagaaatgagcggcagaagtgttgatttgtatggttcattctttcgaagttcaattttttgacgatcttcaaatataatccattcttttgtagagcggcctcttgccttttctactttgggatagatattaaacattcgcttaatataggcagagatttgataataagtagctttcgtaatttcaacattttgttctttgttgtataaaaaaaaagatggttccccatcttcatctgccttatataaattaaataattggaaatctaaatcgccgaatagcaatttagtagtgtcttgaaataatgacggaagcagcatacagaaaagttgaaagtcttcaaatctattccaatcaattcccatatcccataattgaacacggtacatagttgtatttgctaccaatgtatttacaatagaatatacatttttttctcctgatcggagtatatctcctatggttggttgataaatgggaatgtcattgccatattcactcttaataataaaaggctctccaaaaaataactgcagctcatctatgtctgttttaaccgaatctgtcatagcgattattccttcctgtatagagattatttggacaatcaatttgaaatttaagagtgcggcaataatagcgagaatcaataatatcacaaaaatcattgatacattttaactggtttccaagtatgttggaccagcataaaagatccttgacaatgtaacttaacaaatctgtgcggatcactccgtattctgtatccatatcatcttcgtggactaaacacataactgtaaggatttgatatttaattaccttgttataattatccacgctattatcatcaatatcgaacataacaaaatttaatacttctttattgataccattcaatttaagaaatggaacaatctgcttacgttctattctctgattatactcattgataaattctcgttcttctaattccttttgtgatggatgaagcttatctataaatctatttaatggcatcttttctctctttcctaaaatttcgttaagatcaggatcgctattgaaaatatcttcaatgatatgttttttgtaaataatatcatttctttgtttgtcatctaaatcacgatttatatctgtaatattacgtttcattcacccacctccaattctatagaagaacgaataaaaccatatctatcttctacagataacaggtaatgcttaccgatgagtttttttgttcttcctggtttcacagaaataactccattttttaatgcagttatttttataagtccttcgaaatgagaacattcttctgaagaatagtgattttcaacatttacaaactctatattccagtttaaatgagattcaacatttgatggaatacattcgaaataagaagattgtccaatatgaagatactttaaaatatcatttaagacttcatctaactcaccttcagaattaagctgcatccattttatttcagggttttcaacaacaggcataaaatcatccttaacaaaagaaacatttgattctcctgagtcgttataataatcgcatattttcaacttgatattatctcgtttttcatttaattcgtcctgtttaatagatagctttatgatacctgatggatttaagtcaacaacttttgtcacctgatataccttgggatcaagtatattgtttgtaagcataaatctttgttcatgcataatcgttctagtatcactcagtcctaattcatagatattatttccatatgtataataagtatctggaatccatgcagatgtaagattatcaagtgctgaactatattcatcagtccatttaccacttgtgtaagaacttgcagagcggttggctccccaacaagaatagagattatgtttgtaaagccacttaaaattccaattacattttaaaacattatatcgcacataagacagggcatcatctcttccgacaataaaccacagttgagtaatccgatcatctggaagagtaaaaggattatcaagttcggatccggataaattaatatcaaaatcattatcgtctggaataaaaacatatgaaccaataggataatgaattttaggccgaaattgtaaataataatccacagcatcttttaaaatagatggagtagtatgaatttgatacttcgcatcttcaaatttccatccattttgtgttagtatgtaaacttttttatatgcagcatccgcagtaaatgtctgattaataacaatatctgattcgttacgtttaatctgagagagtgtattgccttcggatgctaaataagatttatacatttcagcagtaatcacaaaatcaccttacctctcaggaagcttatctactaaagaatgtgcatctaatattaattttctataagataaataatcaaaaggctcagtttttgtttcattaaaggctgcctggagcagacataaaatagaaacaatctctacaggatagaagagaagagtattcaatccatttatctttttcatcaaattaataaagtatttttcaaaattcgtatttttaaactgatcttttgttttagggtctttatacagaagaagccaaaacaattctttatgtaattttaccttatattccgataattgtttttcactgaagtgaccatataaatgctccattaggaattttcaccgtccaaataagaattccatatatatccacgatctttaataatagacttttgttcatttattaaagatcttttcaagtctttaagactgttaagatgacttgattgtgaataaaatttctcttcttttgatccaaatacttgtgtcataagattcagattattaattttaggtgtgatccattcaattaccatcccgattccaagtacatcggtaataaattctttatcaaattcttcatcgacagaatatttcatagaataagtcatttcctgaagaatatcatctaagcgtaattcagaaaacaatcttcgaacataaggtttgtttgcagatgtatgtagccaatcacataaaaaaacactaacatcatctaagtgcatagataataaatcatatgcttttactttcaatctaaattttgagtaaatatcatcgtaattaagtgaaggcataagatacctccgatcttttaaatatcaaataatccggtcattatactcatttcagtatcgtaaatttcatcaagaacttttatctttttaacactgtctaaacttccgttactgatcatctgggacgcaatatgcttgattgattcctgtgctccagatggcagtgacaaaatagttgttttcatgtcactgggatttaaatctgttaatacagttcttaaatcgcctacagaatacagtgtttcatatattttctttaactgtggaaactgagaaaccagttcttcatcttcgattacaaaaaatggtttaatgatatatccgttattagatcgaatggctgcaatcagatcctggtattcaacctcgacagtatcgccattatctacccattcatatacaatatgtgactttaatccttccataaacaggcttcctgacgtaatagatttacatggaataccgtcagaaggttcataaattttcttatttgctttagcagcaacagtttttgacacattaacttctgtgctagcttctacatcaactgtagaagttttttcttcagctacagttttcgtagctttacttttcattgatgtcgccatgttacgattctccttttattcattacaatcctccatttataaaacggaggattgttttattaaatatttggtatcaagccagagtccacataccaaagtaacgtccaatctgagttgcaacacccattgatctctgcacttcgtatttcattgtgtcgtccattctctgtgccttgtctgtaatttccgtgatttctgtttcgcccacgtcaacaaacttgataaatttgtcttcgacctgcggcataaaatacagtgttttaggattaagtaatttcttggttgtatcattgagagcaaatctctgcggaagctccataagcacatatggtccgtaatatccaagtcggccagttcttgcaacagaatctttctggtcattactgatccaatcaacctctacaagtttgttaaactgctgtaaaccagttcttgtaccaagaattacaacaggcgctccatcatttgcgatagaaacattctcaaggatttcatccagtttgtctttaacagagtttgaaagagcaccgtttcctttaaactgagctggaagtttatttcctgcattcatcatttcagcatagatgtcctcctggatctttcttacgaaagcagatgcacactgatctgtgaatttagcccaatcaagtctgcctgcaagatacaggtcaatatcagcaccaacagcaataccgtatacagatgttgttacagtatagctttctccagaaccaagtctctgtaaagtaaagtcatgatggtccccggcaattttagtaacagaaagaacaactttatcgttggtccagaattcctgtgaatcaccacgggcaatatttctttcctctacaaaatcattaaagaattcagactctttgaatccagtctcaactttaatgtcgatttcttcttccataacctcgaaaagctctacaccatgctttttcattgcacgatttctttcacgctttgttgaattttcacttaagcccataatagcataaacaaatttacgtacagcgctctctgcttcgcgtttggagatacgatttccatcttcatcaaacagctcttcattatgattcagatcatatgtaagttttctaaatccttcataattttcctccggtgtaacaccgtcctcgcacagagatgcaaaaacattctgtgtatataaacttaaatcattaaaaaataatctttttgccataataatctattaacctcctttcctttgaatttaggcttcagaagcagcaactttcagtttcttattttcacaagtaactgttgccttagcttttggatcgcctgtaaatccttccttagatacttcaaatacatctcctacatgaagtccatatcctcttacggtatcgccggaagcattgtagaagttagattcctttttccatttatttgtccagtcctctgggataaatgcctgcatataaacaaatagagcgtctcctggtttagtcacttctacataccagttgccatttgcagcctgtttctgaataactccttcgaattctgtaacagcaccttctttgtaaagatcaaggccaacaaaatctcctttggctacaagatttccgttatcagtatcggaagttaattcgatgttatagatgtgttctccgccattctgagcgataagcttagaagggaaagctacagcatgagtttcgattgtatatttaatcgccatttttattctcctttcattacttttttacaaattaaaataggggttaaaatttcaacccaaaatgatttgaaataaaaataagagcattatgtcatgctcctgttttaatatccgaaaaaagttgctattgtacaacttttgcatacgaatcatttgctgaataatgaaccgtatttatttttcttttttgttttagatggaagatttactcttgagaaagatttctgtggttccttctgagccacgtcattattttcatatgagaaatttaaattgccggatttggcataagacaaaagaattgaatctaatttattcttaagatcatctaaagtgaaatctgtatgattttcattgagttctttgaactctttggtcccataaatagctttataatcatcggaaacaaataataaatcctttgcttcgtcagcatcttttttcttataagcttcaagatcagctacgatagaagagtaattgcttctcattgtctgcagctctgcatactcggaatctgtcagtagttctctatgaagattgtatctttcgccatcaaaagttacattatcaccatcttttgtataagactgtccaaaaatcttatctccactccaattttcataagtgaaatatgtatcataaaccgcattgataaaataccattcgttatctgtgtcttcataagatgataaaagctgatataatgcatatctgatatcatcatgagacagttcaaatgatttaacaaaaacttctggctctttattttctggatttacagagttattatctgtgttatttactgaagtctcaaatgcctcagaaaaggcggtttctaattcatcatcggaaagtccttcatagtcaaaagtaatatcttctgcagatttgccatatttatttaaaagctcctcaaacttattcacctgattatcctcctttccattaacatttacatcattgaaattagagagtgttttgtttaatttctctaatacattgattaaatcctgatcaacttgatatgcttcacgacaattaaatacagaattattcgcttcactaaaatcctgtatatctaatctgcttccaagcataccttctcctattccccggccatctttttcacaaccaagacaggtaacaccagtgaaatagaaatcttctaattctaaatatttttcctttgcgttatatgacatagagttaatacaaagctcacaactaacttttgttccgttttttcttctgataatatctgcagccatggtataatcttcaggaataacagcagtggctataacataggttttatccatatccttatcatattctaaataaggatcatctgcggtaaactccccgatttgtttctctgtatactgcagtatttcttctccattttcatcttcaacaatttcaatgtcatgagcatgaaaatcatattctccagaatctaactgatgaatatgagccaacagaggtctgtattttaaagacggcatagcctttttcatattttcttctgaggcataacttccatttctatttaaaagtgtatggcatgtttttaccttaacaaatagaaggccttttgtagaattttcgtcaaaagataacgagcctggaatttgtacagatagagaatatccggaatctttagaactaaagttatagaaatgattttcttcacaaaattttactaattgttctagtgttaatattttatgtttatttggcattatgtcctcctttctttgagtgttaaatactcctcaaatagaagagaagtgtattaaataaacaatttgtccgtataaacaatatcattaagattattgaatactaacttgttgttattttcaaaaatccactgctgattattttgcataactaaccggagtccagttttttgtaataacgcagcagattccatatttgttgttataataaattttttattttccatgtattcacctattttgctttatccgatttgtctctggaagcctctccgtcatctgtaatatcatcattatctttggtcggcgctccaccagaatcagattcttcattttgtggatttgagctactttgtgtataagagctttggagaggaatgagtttttgagataaatgaagaacttcttcttcaaagaaattaagagacagggtatccttttcagaaaattgattcaaagaattataagccaatttagtaggcattccatattgtgcagattcaagcagttgttttttgaattcatcttttgtataagcgctgacttcaaagaattttacctttgcaggattgcttacatagtatgataaaaatctattaacccatccttgcgtttgaggcagaagcattgatattgccatttctgtatctgcacgtaccgcagctgagaatgctgttgtaccagatatagaagcactgttcaagatctgcgcgccaccagaagaattaaacaatgtttctgttgctttggcaatcttatttgtatctgttgctttatcattgttaaaagatatctgatcgagttttcctgggataatagcagcagaagtgtaatcaggaagagcttcattgatcattctgttaaaatactctatcacaatatcaggagtgattttccaatcatcaggactgtcacttcccgttattgtttccaactctaaccagatcattttatagatatcttgttcatctgcaattgcttgaagatcatcaagatcaatcaaattaataatcccggataataaccctgaaaatacaggtacaactgtttcccaatcttcagctctggcttttagacatattgcatattcatcaggcattggttgccatttgccgtttgatgtatcattttcgtaagccctatacattgaaacaaatggttcgcctaataactccaatgtagattgccgtgaccgaaaataactcatatccatatgaaaagaaaaatctccagaactatatgctccggaaattttacaataatcaggatccaatggaagaataaataatccggtttcatcataatatacacatccatatgcagcatcttctctaaaacatatggtgtataattttaacatttcgtattgcaaattcattttatctaacacagttaatgtatcttgataagattttagcatttttgtagcatctccgcctttaaccaaatcgtattccggtatgacagatcttgcatccagacaaaacatatttgcattgtatgataccagtctataataagcatggcatctataacatagatatcttgataagtttcttaaatttttttcattgctgccgatattttgaagataagttcgcaggctatctttattaaatgctgtaattgctttaacactggattttgttatatcttttagggattttggtccttccatagccttagcataattttcaatatttattttattttgattataccaattgcgaatgtcttctgcggagctttgaggagtaggtgctggggagaatttattaacagaagatgtttccctattagacacctttcttcgtttcatttgtcgtgccaaatattcagcacctcctttattcaaatacagagcggcgaactccttttcgtattatgagagattgaactaatgatttatcagcttttggctttcgtttggatgtgatatttttacgccgttcacattgcaaggcataagctgacatagccatagtataggcacggtcatcatgtagtttgtttcgcttttccggtgtaagctcaaatgaatctttaccggatgatctgttaatacgaatcatatttacaagctcttcttttaaagcatcaatacttgataaagaggcttgctcttgccagttaagtttttctatatgactattcacattctgaatattgcttaattcctgttgtacataatagtcagtctcttcttcactcatattattttttttacattttgctatgagcgatttttttgttttttcatatttttctttatcttcatcgaatattgtaagataccccttaccatcataagaggcagtaaactctattttatcctgatgtgccatctctatcagagcttcatacatttctgatttccacctgagaggatccataagatgtattttatttactgcattcgggaatttctttacatattcctcagagtatactttatcaataagacctttatgcatttttccatctttgcctttccaatcaggcatcagataatcggcaatatttacaccgccaccaccggaaccagcatcaatataaatacccagtatattactgtagttatcatctccgccgttgttataatcaagaattaattcttttaaataagcaatctgttctggtgtctgcataggctttttcttatttttgttacttatatcaatcaagttgatgcaatttaacaatcgcattttatattcaataccttgacttgttttttcgggatatacctcagagacgagtattacagaattgtctcggctacgtgccgggtcataagcaataacgatttttctattgccagtatcattatatagaataggctttcggacttgctcattacgtgagataacacctctccggataattgcatttgctccagcatctgaagtaaactggcaatagtattcccgtcttgccttttctggattggctctaagttcggctttcactgtgctttttgtgagcaaaggctccatcacttcgccatgaatagttggtttaaatgcaacctcgcaatcaatgtgtgctacaaaataatccggatcacccattaactgccttttactaaagtctctatataatttataaaatttagtatctgtagaagaagcagaggaaatgtaaaataattggttaggaatgttacttggtatacacctcaacctgtttctatcaatagtattaccatctctgtctttaccagatttaaaacttttatttacgattgcgaatgcagcaaatgtcgcaagcatctcatcagataagaagccgcattcgtcaaaaactacagatccacgcatacctctttttttgtctatattactattcaacgtttgagtaaatgatccattgtataggttgtaagaaaatccatcagatgaatgactaaaaccatcacctgcagcattcttaatctctatttccgatttaaaaatatagcccgttgatccaagcattgtatctatattatcgttggcgagcttttcaagggtattgaaggtttgttgagcctgggagccggatccggatgcaatatatgtccaataattacagaacagcatatccttagccataatcatgatatctatgagtgtagatttaccaaatccacgtgtacaaaccaataatacattaggacaattccatgctctttgtattatccatgcttgtgcatcaagtaactcaatattgaaaaaatcatttataaatctcacaggattacattggtaaaacttctgcatatttgcaattttaataagactttctatcttacgagacgacattgcatatacacctggttttacaaatatagtagactcttgtggacaataatttagttcgggcatcttactgaggattttatgctgtgtcacttgcgatgtctccagattcttcttttgactcttcagactcttcattaatatcactaaaacacgaaaacagatcgtctaagtctatcaaattgcccggctttaatagatcattttcttccatataatctttaagatccatattttctcttaacaaaatacgggtgatttctttgtaattatccaaatcgcttctgagatctgtgatcatctctctctgatctgcaatcatatctgcgaattcagactcatctaatcgcaactgttttagaatagatgcattgctcatatccataacttgttgcatacctctacacgtagcaagatcaaaaccattaacttctccttctcggagattcatatctttaatcttcttcagtttaccagtccaggtgttttcacctttcttagcattctttgtgtttttcaaagaaatacaactttcagcagcaagatccttaatcatagaagtaaggtcttttttactcgcttgtaatgatttaattgttgcagaattattttggagtttatttatatcagacatgtaagtagaaatagcattatcaattttggattgctgaagaaatgctcttacaatagaaacagcagaagcgttcctcatcatatcatcattagaatcttcgctggtatccaataatcctaaaagctgagaatataaaaatggtttatcagaaatggattcctgttcaaatggatcatatcccagtaatcgaataacatcttgttgattctttacaaaattactatacgtatcttcagattcgtgacccattaccacatcagcaggagtcttttcgtcttcgtatataattttttctttaaataaatcagaatcagtaaatgtcatacctacataatttaccattgaaacagttcttatataaacagaccatacattctttttcttgtttttagcaatctgattattacattcattaatacttgcattatatacaacctctaaaaatggcttgtcaagatattttaatgccattataatagattccctggtaggagagtgttcttctccgtttttatcaacacgcaatgcaatttttctggcacaatctttacaaattggagtgacaccagattgaatcattggatcagaactaaaataaaaagaatctaatcttttaggcttcccacacatataacaccaggctgtatcgttttcgtaaatctcaattttatgttctagttcttcgattttgtttctcatctgagcagcagtcatttttacaggctgtgcaacagttattttctttctagtcgccataaaaacaacttcctcctcattttttttatttaactaatagttggtacaacaggattcgaacctgcaaaattctgggcctaaactagacgcgtcttccaattgcgccatgtaccaagaaaataggagggcaagatcaccctccaagaaatgtataatatagacagcagcgccatccatactatttgattttttgttgtaaattgaaaataaatgtgttatcctgtctattgaggtggagacacctaaaaggtgtcaacgagatatcttaggggatatctctagtggagctgtgctgaacgtaactacggctgccgtttgcagtaggcgtgagtccatattacttcattctgtgctttagccagattggaggtatcaatatgaatgtaatagaacttggtaatttactttgtaatattatattggttggtttcgttatacgagatcaccacaaacgctaagttacaagtaagcacagaggggataacacatttatttcatttataacttatatctatattcgcacacaattccacttccctgttcaaatacaaacatcgaagctccggcaggtgctgttttatttattctcatactatatggattaattcccataatagatcttactgatacatattctgaatcaatcccgacatctccagtaaatttagaatgccaatgcccagagaaaatataatttattggaacgccgtatgttactgaataatttttcaattcttctccaagatttttggtttcgaaatgtccgccaagaaccgtatatgtagtaagtagagcatatgcaagaccagttggattttcaataataaccacatttgtattgttttttaaacgttcttttataaatgtaagcatagatttactcatatcctcatctggaaaagaatttttaggttgtcccacaagacgtagctgattgtgatttgatctttttaccatttgaaatttgattttcacataatgacttaattcattcagccactcagataagaaatttgcgtataaaatagaagaatcaattacaccatacttaagattcatgagctgggaatttgctcttaaaagaccatcaagatcatctccaaggtcaaagatatttaatactttaatattatccgttttgatctgatcgactactttatagaataaatcccacattctattctcaaaaattttcggactatattcattcataatatttccatacagatccttaatacaaaactcaacgccgtaatgaggatctgcaatcgtaagcaaatattctctttttaatttcaacggaataattggttttggaatatccagcggagctaatttgttaatggctgcaacaattttttctgtaataagttcatcacgagataattcacgaagccatttattcatttctaatttctctgtctggagtttgatacgttcctttttaatttccattgattcattagaatcggactttaaaacagaagaggatgggagaatatcccatcctgcattaatatactcaagcagcaacttagatccttttctaattgtgtctctatgttctgcttcatttgtaaatgaatttctgaaatctgttacatcttgccattcaatcgatggatcactttgttttctttttattaaatcaagctgttcctgtaaaaattcatcattgttcatatattataccttactctgaatccttgtctaactgatctggatctatgctttcttcagttttagtagttgtagagaggtcaaatggtttttctccatacactctttcaagtatactaataatatcaatgatttctccatctaaattgacaagctcgccgtctacgatatgtaatccttttatttttccatcgtattttattgttttcttaaaatccatgttttctccttatattccttaataatacgctatctaatagttacagaatagtatatagatcacagtctatgccaatgattttatctacgattcctttttctttcgcttcttccggaaacatataatattcacgatctttaatttcctctaagaattcagcatccatatttgtattttctaccataaacttagtcattctttcttccagattgtcgtaaaatttctgaatatcctttcctttattggaagaacttacatatccagtttctccatcatgatagagtacaacggtattagggaagcagtaacgtgtgtgtcctgctgcaagaatataacttgccatggaagcgcattttgccattccaactgtatctacaggtgtaatggacgttttaatacaacttaaaatctggcttccggctaaaacctctccaccgtcagagttaatataaataaagatatgctttcttttttctggagcaatgtctttatcttctatattccatttcatgatcataagacatacattttcaatacagttgtcgtctacagtctcatttaaaacgatttttctattctgtaaattttctttgatgattccatcataaacatcgtcatcatctaaaatcttaaaaatatccatatattccttattctccatttatttattcaagataatctaattaccatgtcttttgtggacacgattaccttgtgagttttattttcctttgatattgcttcaattaaatcttccttcagactattctttgcctccggcgaaccatgaaccaaaactaacttttcagtatttattttagaaccaaacaaaatcagttcattccggttcgcgtgacttgaaaaagtcccaagtgatatacagtctgcattattcttaacaggatctccgctgattttaatatacttattattcttagaattcttaattcgataagataaataagattcatctgatcccgtgtatccagaaaagataaccatactgttttcatcctttaggtactcatgcaaataagataaaatccttccattcgtacaaaatcctgaactactcagtatgattttgggagttggatcctttacacaagccaaagactcatccttatccctgataaaatttacattatcccacgcctgaacttctttccacaattccaaatgttcgccatccagaatgtcattgtataaatcacaaatatcacatgataacatggaatccacaacaacattatatgagaaatctgtttcgtgaaataatttatatatatttgtaagaatttcttgcgttctgctaaaactaaaacatggcatgattactgaaccaccacgttcggtaacagtatctattgcagtttttagcttctccaggtcaaatttacgagtttttttattgactcgaccaggagcgccatatgttgattccataattgtgattttattaaaaaattcagggatttctgtatcatttaagaaaaaattagaagtattcatagaaccaatatcagaagtgtataagatagattgttttacattatttttatcttttaagataagctgtaattgccttgcaccaacacaatggctgttctcaaaccattgaaaagagataacatcatccaattcatatattttatgaatttcgtcatattcgtatatatgttcgagagttgtttttacatgttcattcgtataaataggagagtagttgcgcttgtatctgaatgataaagccgcagcttcgctttccaatataaatgaacaattatacagcaaaggtttcattagttctgctgttgcatgtgatgtgataatttttccattgaatccttcttttatcaatcgtgggagaagacctgtatggtctacatgagtatgacaaataaatatataatctatttctgagggattaaatggaaactttttagaattgatattataagaatctaaataattattattctggaataatccacattcaagcagaatctttctaccgttaaaggtaatataaatacagcttccggttacatcatcggcgttttgacctataaaatatagaccattttctattttctttttttgctatgtcaaacaccaacctttattattatttttttctgtataaatctgtctggtggatattttttcgatatttatttaaaagatccacgcttttaaatgatgtagttaaataataatgttttgcatttcctttgtgggttttattatgaacatggatatcatgatctcttccctttgaacgcaaatattcagcttcttttttgttaattgtaatcaataaaatttcctcactttattttatttctcttttgagatagtgggtagggttggattcgaaccaacgaagccgaagcaacggatttacagtccgcccgttttaaccacttacctacctacccagaacatgcccgtaaggattcgaaccttaatcttacagttttggagactgccatgataccaattacaccacggacataaaaaagaagagtctatcgactcttcttaaaatgtgttttattctgttctgttaaatattgtttattatgtcgttccaatatgaaagtcttccctgtaccatatcttttcctgatgtacctcttccacagtattgtttgtaagtttcgttttcaggatatgtttctataaattctttcaatttattttcaaatacagaataatccttattttcttttaatacagtatatcctgcatatataatcataggtatagaagacgagttgatttttgtaagttctttattgttaaataaagaagataatctatctaatgtagctccaataagataatgtgttgtatcatctaaattatctccataccaacggacaaacttatcaatatcttttgttttaaatgatgtaaaatcattatcacctacactgcatatcaacatcaaagtttctcttatcaaatctctagctatatcttttttgatttgtgtaggtgttaaaactttttcaaagaaattatgatcagcaagagaaaaaacaactttactcatctcatcattttcaattgctgtacgtttctgtgtatttgtcaatacttttccgttgttctgacggcgatacatttcacgaatatcttgctctgtacaatctgtaaataaaaatatcgtgatttcagcagcattgattttgtcctgtactacctcatccaattcattaaactttttgccattaatatcgtaatctacattatcaatagtaacttttgaaaattcacttggaagttttaatttgtattcattgttacagaaattaacaatattagtggatcgctgcactccatcaaaaatatatctgatttttttacctggaaccaactctttgatttcacatcgaattggatcaacaggaatagatcgtaacaaagaatctattaataagcttttttgttcagcgttccattgtccttcttttcgttgcagtttatgtttagtattatacatcttctcaaaattttttacaaaactttgtacagctgatgttctacttgaaaattccatattaatacctccaaataaataagatttatttaataagtataatatagaattttatatttctcaagtttttttaaaaaattttgtaagatacaccttaatttaagcgctgcacacaagattcgaacttgcaagccgtttccggccaacgattttcaagaccgctccctcaccacccggacatgcagcaaattttatccgtctttccggattgtcagaccgcccagcagtcattcgctaattaacatgctcccaattatataaacagcaacggttcatatagaatgattttcacattcgaactccaacaaggttggtggtaatttacatgtttgaagcgcagtgcagagtaatcgaaactcaatcctattggatcacacgacttagcaggtcggttccacacctcatgaatttacactgcaggaatattgacttcgtatattttataacatataatacaaaagcagcatttcttgctgtttcttttgccgtcagccatttccagagtttgcttgaacgaaggaaaggtaggtgacgaacatggttccagacttaaataaaccagttcacgttaatgcgtattggcgtttccgtttgaacaaatgggaacacgtccatgaacattgacgttccttacctagctgataggtaagaagaagctgttcatctgagctttgaggtcaaactctctgtaaaagtttgacaacacttcttagatgactgacggcgcttcttaatataatactaaatactacctctgggattcgaacccagactccttacggaacacgatcttaagtcgtgtgcgtctgccagtttcgccaaggtagcaaattatcttgcaaaatttgcctaatcataatataataatccagatgctaggcacgcatagcagtgaactataaacgtagcctttaccaagagataagataggtaaggtgaatacctcttggaaaatctttttaattcatttcagagtgctattctgcacatatatttccaaattcatgaaatcttatcaggaaggaggaatgcgatggacagaatagctgacataattttatctattattgatcagtttccttggatatcattaatgtacatatgtaataaagtttacaaaaataaacctaaacatacaataattaatgtttcgaacaaaatatctatagaatctgatagataatagtgatttgacgagagtaggagagatgttatgtttttggtggaggatgtcctccaccatttttaataatagggtagaacaccatatgggaattgaaaccatattgtttgattggaaatcaaaagtcatagccattagaccaatggtgcagatgtgacaaaatacaacaagtgtgctatatcttgtcatggaaggtcgagaaccccaaaatggttcatagaacgagtcacggctcgttcatggtaagccaagcaacaagcaactacggccgccgtaaggtggaggttagcttatgtatctcactttttgtagctttacaatacaggaaggagagatgtactatgaatactttaatagtaggattagatgttttgattatagttctcagagtggttgtgtctgctttgaaattatatcaaacaataaactaacattgttaatgagcttggtgggtatacaattcctgtaaaaaacaggtttcatataaatagcaggtaggggagttgaacccctctatgtaggatatgaacctaccgtggaactgatccagtgtaacctgcgatatcctcttttggtggcaagtggaggtgctgcccctctgtttgtcttattacctacttgtcatatagttatccatggttctatatgcttttcagatattctatacagaatatagtctcatattgacacttacccaaattacttttaagcacccacacagatttgaactgtgacaaattgattacaagtcaatcgtgctaccattatcactataggtgcattgaaaatgatggatgtgggactcgaaccctacattactgccgtgaaagggcagtgtcactacctttagaccaatccaccgtgggagatcatttcctatctccatgcacaggttttcatgtgctatgcatcctaagataacataccgctattaacgggttctattgggattgaaccaatgacattttgcttaacaggcaaacgctcttccaactgagctaagaacccaaaatatgctgagattacacatatcattagaaatctttaaggacattattgtttcttcccgtatccactatatgctgcatacgcacacatacagtaatttccacaaccgcctttttatagagtggcatttctctattactgcataactactctaacttccacattcagtcaatcttgccagactgtaaatctccgctaagagaaccttgcagtatccattagacatatcagagtcttgcgagactcatcaatggccatattacataaaatgttatggcattaggctgctttcgttacacagaagtgtaggctttcgcttaattttcttcttacaatcaataaaatttttatccatcatgtatattgttcgtataaaattaatgttatcatctctactgaagatgtgctacaccagacgctccgatcccttttggagataagaatacatcacaccttcatgcctttcggttatcatccctacttaacgtctatataagctaatttggattttccaattcactcatataaatggatatcgcctttgttcaataactactcagactatatatcctcctgattcactgtcatatcttcgtaagcttgcatgatctatctgatttgcagtcagaaaatcaccctcagcactcgccgttggatgatcttatcaatccttacttcatgatattatttccatactggatttatatgatatatttcacacctgcatgaaacaaaaccttttgggtcttcagtatgtcagttttgcttgaattgactatatttctatagcgacagcatgtagaacactgcctttacacacctcacagtgcgctatcggagtcaagcctccatactgtaaaaatctgttaaaataaaaaagaaaataatgtttattataaaaataataaacaagctggaatgacaggattcgaacctgcaaatttcgtgaacccaaatcacgagccttaccaaatttggccacattccaagataaaaatgtctttctctgtgttataaacattattatttataagtcttttatctgctaaaacagactagctaactgcctagtaacatttttataaacgatccaggagggattcgaacccacgatctctgccgtgacagggcagcgctttaatcctctaagctactggaccaaaactggcacttatatgccagttggaatttctaattaagcatttactgcatctttgattgcttttccgaatttacacttaacggtattttttgcatcaaccataattgtctcacctgttcttgggttacgagcagaacgagcctccttatgtacagaatgaagtgtaacaccatccatcagctttacttcatcgccgtttgcgagagtggaaaaagtaacatcctgaagacattccattactctttttacgtctttctttgtaaattctgcattctgtgcaactgcactaataagttctactttgttcattttattttctccttttattcacatatattatttttacatcatagcgatgtataagatttttaagtttaagaaaaaatgtgggctgcaatatctgatccacgattatctaaaagatcataagatggaagataatatgtaatttcgtttccttctttatcaatctttttcttttcaatacctttacattctggattcgtgcaagccataacatttccattgtctaaatatgtcataggacttccacaggctttacacttatgtttgtttacaaaatcttctctctgcttcataagcttagatttatcacttgttcttttggttactggttttaaaccataagcagctctgagagattcgagagatgtaaaatgttctgttgtgtcctttgacactctgtagttcttcataaaattctccttattttcaaatatatatttgtaataaaagccgtgtataaagcccacggcaggcgttgcgaaaagaaattaaattcgaattccgtatttaaacacgcattggaaatagcgcagaaggatcactctttttcataaaactgtttaactacatgtgcatatatcatgcgcctgataatatgcctaaagagtcaacgaagtaaaaagttatttccctcatataccggacgtaactcgatattcattttatttatattttatatggatttttttaagatattttttttgacattctgcagatttttgggaaatttgatcaattttgaatgaagtttgacaaaaatacatcttggttcatgtcatggagaagttttaacagattgcgtgtgtatcttgaatattcttttcttcttcccattgtacttgtatttaatgcgatttctataagtcgattaattgttttgggattttttattctgatttttctaagctcttttaacatttcatcgtatttattataataaagaacgatttcatcatcatccatattttccttgctcatacattctagttctttggcatattctgtgattttatttatttgtcttaaattagcttttccagatatctgaattataaattcctttgttggaatagtatctgttcgtaaagaaaattttactttacttaaagcttcctgtagatcattcatgggacaatcatattcatcagatatacgagatgttaatctgtctttttctgctttaacaagagttttatctaattctttaccatttttggtatattggatttttctggtatatttcataaaagcagggaagtcacgttttacttttttaacatttccattctcatctataaattccttatactgttgcatacatggaagtttcttaatacgcttgatttcttcgatagcatcaacctcatactctcgtttgcagccatcgattaccacctgagccaatacagcaagaattacaaaattatcataaagttctttatcgctctcagtccagtaatatgtcattgcaagctgtgcaaggttacttgattctccgattccaattcttgattttgcaaatttattatccatacgagcgtattctttcattgtatttttatatgttaatccgctttcctgtaatttatttactacagtaggaaattccttataagcaatctcagcgctggataccattacttcattattggtaacaaagaagaagtctgaatcgaaatcacatccatttgccctgtcttggacatctgtatgaatacagtttacagccaaaatattatcactgaactcaaaatatgtttgcagttcatgactgtatacattatgaagataacatatattgtttggactgttatgaggatttcgtataccacataaatgttcttcgtcattaaaccgtgatgtatagcattgaatcactcctggctcataatttaaagtaggatcattttcccatttttctcctacagaatagagtagaagagcataaggatttccgaaaattgtaaggttatctgcatttactgtaatcttacctgtacgaagcctatcaacatatcctttaataattttccttttttccgttctaaaccatgtactttctgcaaatctgtgattgtgattatataaatcggccatcatttcataatgattcacagcagtggcattttttcttaaaaattcctcgaacacatcattatcctcttttaatgtgttgacataatcaatacttgttctagctaattgaaaaattccctctttatcacatggtagagtattaatcatctgataactcatttgctgaacatcccctaacttactcggatgatcagtttttactattccccagtaggatccgtctgcatttacacgatcgcaccagtatttataagcttcttctggagtatttcccataatatccatgaatttcttccatttaatagcgttatccgtggtaatcattttgatatccttaagtttatgaggaataccgaacatatctttaatttcatatgtatcataatcgtttccagtctgattacaccagtctttaaagaatttctgtatatatgttctcactccacatgctttgaagaaatgattacgcaatagagccattccgttgacccattctggaagtatatcagattcgatcaatgcttctccgtcccacatagtattcttaacttcagtttcttcatcaacgacaacgcatttcttctttactacatctatctttttatatcttcgcgtatattttggagtaacgccatctttaagaaattttccttcccgtatagctttttgccgagctgcttcagtagcttcttcatctataaccttttcctggtcaatatattcctcagccttaacaatctttgccattgttttaaaaaaactatcttggtctcggagtataaggatatcctctacaggacaatagaatttgccaacaatagtagaagtagtaagaggagaataagctgacatctcaacaatctttgcgttattcattggcattttctttccaagtcccatagtcagccaatcatatgctttcttatatagttttgcattaataaacataacctgtccaatttttgctttagaagagttacgatatagcattttatagtgtataacagtacgtttttctccttcttttttggtgtatttctgtatgtattctacatctacacatttctcatagaagagttctctaatttcgtctttagacagtttaaagtaattatccttattgttttctaccttctcgaagatatcacggatcctctgtttcgactcctcggaaagctcttcgttttcttcaaatccactaaactgttttaccaaatgatcaagttcttctttataacttctgcttccaaaatcaaaatcaagacaaataatatctctggtacttttttcattccaaatatttaatccattctgttttataaaatcactaaacagactgtcattgaatacagcttcggtatagtcgtatttatcacgaataccttggttatatccaaataacgtacctgctttaatattttttatttttaaaccgatttccatattttaaacatgattctccttttgtaattaattgttaaaccaagaaagtcaatggttggttgactgtccaatcctgtaaccgatctgtatctaatgctgaactgctaaaagttatgttatgatttatagttccaacttcctctatattaaataatgtatcttctggcagcaattttttatcaatcattcgtttgatttttaaacatcttttaagctctgcttgcttacaacttaattccgaatttaacgtttttaaaataaaactattcttacaatttttaatctgttttttaagggaagcaatctttttctttaatatagcttcattactgtttctacttgatctaaaggtgtaatattttttgagatctaaagaaaatgtcttcattaaatcttcccatttgatattttcaatatcctcaatttgaacagacttagcaaaatctacaatatccttgacaaactcaagagtaagaatgaatgtctcatactttaaagtacttctaaacatacggaattcaatagtatcaggatggtttagatttaaagctgctcttttaccaaaattcttatacttaccatacaattctactgcagaaacttcatccttcttatcccctacaaacttagaataatcattatttcgtcttgcgattacacagatattatcattgaatttctctaatatatataatatctttgagattaccaactcctgtatgagagaagatttacctaaatagctgcgatttacatggatatgtagtccagcgctattacaatcatgccctttatatcctttttgatcaagatattcaaacatttgtttgtaattcatcttatgtttatgaaattctaggctgcatggcatagtatcaaattctatttccacagtgctatcataagtgctataaattaaatcttctttatcagaatcagatccgtttataatctgaatacatttcttaacaacattattatgctctgaattgctatgattactttctccgacttcaatttcagcgccgagcagaagagtagtagctttatcttcattcttcatgtaatgaggaatgtatttaggtttataattatatggatgaatataatttttattatttttcgattcttccataatggtaatggtataccagttttgattcggagggaaacacgcgtcagtagttgttatcatacttctgtgtccacgagaaggttcatgcgaagatgatacatataataaaattcttccaaatgtactcaggaatgcatcatctataatttgctgaaatgataattttcgaaactcgtgtccatcaacatatatatacttagaagtataatatttatgctgatccaagtagctgctacatctatgttgtgcaacaagaagactatataaacttgaaggatttccattattaacctgatcccataatttatccataaaaaaatcaaaaaagcgattatggttggtgtgctgtattagttcattaaaaaaaatattgtcatcctgactgtttgtatagtcatttgataatatatctacttggtcgtatattgcacttcgaagcaaaaatttatatttatataaactaatatgatattcatatgtcgtagttttaaaagttatattatagtcatttgacgataattctgtttcgatatttgtaattaattctccgttgagagtgaagggatactgggtgctcagaagcaccctatccactaaaatatctggtaataaaaacatagtttctcttatacctccacaatttgtaaattaaagttcatccatccaggcatcttcatcgtcttcttttcttacatcatacatctgctgtacaagttcattgacatctgattcaaacagttttgttgcaacatcaaacaactgcggaagcatattaaataccttatcaatataatcaagacggttttttactttgggttttttgccgctaatcatatagttttcatatctggctcgtgtatcaaatttatagatattatcaaattctctataaagaaccatccagcgtctttcaaattttccatgattattccgcaggatccgatttaagatgtgtctcatatctgcagttggaatatctttagtaagaccgtgaattacattggtctgataatcaatctgttctgttttctcagagatctcctggttcttctgtctgatcatctcgttctgagagttaatcacatctaatgtgctcttgaacagtgtcctggtggtttcatcggcaaatgggagatatgtatccaagaacaagtctgatctgtttttatccacatagccgccagtctttctgatagcaggtaatacttcggatgttatccaacgtttaaatttctttgcggacggaagcttacttgaaaggatgagagagtagagtccggactcattaataatggtcatttgttgaatatggttgtttgaatctgagacgccccgttttagggcgtctccttcatcaacgtgttgtgacatggcatttcttgcttttgtataccctaaagcttcagcaacatcctttcctacaaaccacggctccccattctgcataatcactcttacatctccgaactctgaattactgaacgtctggagaggggatgatgttgcggtggaagtagtagtgtttattgtcttacttacttttgccggaataacctccggtcgtttatttgttacattgtttaccttgttacttgatttcttcatttttgttgccataattatttaatttcctttcgtttaatagtgttgtggtatttctaataatgattagtttgtgccatgatttatagagcataaaatcagatcaatataaaattttttaataaaagttgctaaagtaaatactccaataataattaaagagtccatgtattatcctccgatttactatgtacttttttaccttctcgctcatctctgcatctctgacataaaactgtataatttaaatgcttcttcataggatctgtatgcttatcgctgattttatccttagtcataagaatttcttcgctatgatccacagcatataaattcagatgataagattgatcctgtggaatacatctctctttagcaaaatatgatccacggataccacacttggagcatgtacagtcattttcaaagaatactcttagccgtaaactatttcctttaatgcgatcgccatcaagattgattttagctttattcttatatttctcgaaaagaacatcctctgtttctttattgattctgtccaaagagtaaatttcttttctttccatattcttttccataatctttattcctttccgatataaatcagatcttcaatatattttctatttccacctttaaatataggaatttctttatcaataatccaatgagttctacatactccatattcttctgggtctatggttcttggtttcgcatttgatttatatttttccggaagttcatctcttggaataaaatactcttgtttaacacaacaagatcctattttctggtgtatcggaagatcattccagttaattcctttttgtgtcatcagcatatcttgaatctgattacatgatttattctgtaactctttatgggaaaagtttgcttgaccaaccatctggatagaattgcgtgttgcatctatctgtctccaataaatcaaatttgcaacttcttcttttgggatattaaaacacctggcatcaaacatagctcctttatcatcggcggcacaatatacagaactcatacgtctgaaaaaatcttgttctttttctgtatttataggaatttcttttaagtaatccatatagttcataaaaaagtatttgttaaatgccattgtagccatacttgctgcaatactacataccttctggatttcataatcaaaccaagcagaggatgtaaatttcttataatctataagaattaatgttatctcatcagactgagtgtaacccaatacgcaaccctggatattctcacataaatatttcatggtatcctgcatagtcttaattaaaacttcatcaaaaggtttctggaattctcttgtgaatgtatgaaaagctttgccatcaatacgaatcgcaacaggtgttcttctcattaattttgtctttggtatattttcataaaaggctttcattcttgttcctaaatcatcatgcactggcatatcttttattcctcctcaatcacaatgttacctaacttcttttgtagtgcaaagaaattattccaacactctgtacatgttttttcaccatttttataacattcatcaagcaattttccgtttatcgcttgcgtaatatcttctggaaaaatattgtttgatataaatggttccattacgtataacatttcttctttgctttcaaatactaatttcattgttcgtttcctttcatataattcaatctacgctgaacttctgcatcattctcttcatcagcgtaatatttatacataagcatcatcgggtaatcatatttttttgccctgtcccacagtaaatattcacaccagtttggttctgattttccatttgttatccatgtaggatcttcgaacatataataaaacttgccatattccttatcgtggataatagttgatttttcatatcctttgacacttactaaaatatcgtgaaccatcactctctttgcaagtctacagagccatttcataaattctttatatgtattttcaaaatctctgtctctcaatgcagcatttacaacaagaatatattcatcttgaacttccatccatcctcgttttcgagatttgcgaccatatctatcttccagattatttgtaatttgaccaaattcatcgcatgaagaggaacaattatgaccattcttttgaatcacatatatatccatatcgccttctgatccagatacaataggtagatgagatagcaccgtatcaagaatatatcttttttctgcctgagtacgtcctattggctccactgtaatagttccattaatataagtccaaaatgacatgtattattctccttctccgtatacttgcaatgttccatccggattaaataatggagtgataccaaatctataagatcccgtgtaaccaatcaaatacattactttcgtatcatttgcatacatcatctgatacttatagttttcgtcattccatgtctttaccgtcgtaaaatatccgtttccaaatgattgatttaatgtttcattagcctttgagtatggcgttccacaccctgtaagtaaagtggcagttactgcagcgaccaaaaaagcaacaattcttttcttcgtataacgtcctccattttgtaatattatttagaaaaattcatataatttcatctacaataccaagagataatgctgtagtagcatctatgtagtcacctatataatcgttggtaagtaattccatagtcttttttgactttgtttggaaaactatgaaatctgctatgttttggtttaattcctgaatttcatcgttatccaaatcaaactctgaataatgctcataatcccattcatatacatcatcatatctaaatcgtgatgttttatagcaatatcgcttgcatccggccagaaatataggaagcgcaatccccattacgctgcttaaacaataagtatggaccggaagatgacagtgagttattgcattgatcaaagcttccatatcataaaaatcaatatttacagggttattgatataaagcttaataggcataggagaatataccttaccatcgatataatatttacgatggagattatgctcttcattgaattcgattaacgtataaatcagatcattaatactggatctatccgaatcgctgcctaaataaagtgtaagactgccggggatagtacaaggtgatgctgcagatccaggtatatgttttatagtttctacgtagggcgagggctgtacaggttctggagatgcagcatcagttttttcataccccggtaagcttgatttagaaggagtagtttttgtggagacaaagttattaaaacggggttcttttcttaatggtgtaaaattcatataaaaaatcctttcttacaattcaatttatatagtgaaatactaatagtctgcgtattttgacatatgcagactactttttttggaataaataaggatattttggattttatttgaatttataggattggaattaacgaattgaataaatatctaagattatatgtgatgattggatatatgtacggatatttgatcgtgttggattttttataattggatttgtgctatataatttctaatattgaatagttcttgtgacgttatagtagcaccagggcagaaaaaagtcaagtgtttatttgttttttatgaaatttgattaaataggtgtcgaaattaaattttatagaagagattgcgatgtgtgagattaagcttgaggcaagaggtttcacgataggatatgcgatagggagaaagagtggaaattgttaggtggagatctataaaggggtgtaatttaagggaaattttaggggtaataagagggaagaaagaggaggagagggattaggaggagagaggtgaaagggagaaagataaaattggggaaatttcagggcaaaattcagggtagtgtgtaagtttacctcataccggaaatcagctaaaatcaatgcctttcagcagttaaaaccacccccatacaaactgaaaaaaattatagtttttttcagtttcatattgtatttgctatacataagaatactttatttataggctttttagtactaaaattgtatttttagtacaataaaaagaaaatttgacattatgaaatacctatatatattaacacttgtaacaaagataaatagcaacaaagcaacaagcaagccggaggtgatcgaaactgatttttaagtagaaacatttttttcaaaactgtatcttgaaaatttaatgcaattcatagacatataatcccctgtctgaaaaggatatggaatcataccacaacgtatatatgatacgggtacgacaggaaatgcacggggaatgggaaaattttccagcctaactcaataggttataaatttgcgtgttatcgagtcaatggggaaaatatggaactagaattgtatgaaagaacccaataaaaaaagtcttgtgttcatagttttgctttggtttaacgaccagacaggcgtaaaaatgcgagtttaacgactggtgtttttatgagcgtttttcctggcttttataaaaaggttcaaagaggagctatacgcctactatccctagctaatttaagtgtacagagatttacacgggggatagtttggtaaacgtggctgttgtgtatagttgaaacgctatactagtagggaataaaccgataagccataggaatcgtactcgactttacttttagtaaagtattaaagtgactcacaagtattttctcttgtgaacggtcgcaagcccgtgtaaacactgagcgatactttacttgtgtacagagaggaggtgttaccatgccaacagtttctgtacataaaaaacaggaacattatgaaatccatgtcaacggtcatttcatacgttcctgcgacagtaacgagctgagagaagctacagcagatagtctctgttattatctcacaggctcatggttatactagcatagtataaacatactgtcaacaactaaataacatgcgtgggttatgctccccacgttaatcaaaaagcactataatattaaaagaaagaggtcgtttattatggcaaaaaacattaacgtaaacacaattacagaggaagcaatcaatttattatcagcgtataacgtagcatggaaaacagcacccagtatccgaaaagcttgtaaagaaaaaattgtagctgctgaaaaagctgtagcggatattgtgacaaaaagagaggctttgatcgaaagtggtgtttctgaaaatgaggcaatttcaaaattttcatgcctggaggaaaataaacgtttatctgttgcaaaacaagagatgatagacaaaaacaaggaattaaatgcaaaattttctgaaggacgttctttagttagtgatgacttatataacgcatatattctttatttgaccaatggggatatcacaaaattcaaaaaagcacttgtaacatttttggctactattggaattattgctgattctgaatggtctaaaactagcaaaattgcacagattttaattgcaaatatttcaggctcaactaaggctacgggaaagagcagagaagaaggaaactatgttaaagcaagagcaaaaaatgcttttaaagatatttttgtagcggctttccttcagtttatcgtgaaagaaaaaggcgttctcgacgaaaacaaggattatactttatcccgtcacaattttgataaacaggaacagaacaactctacaacaaaatgatcaattacataccacaccaaataggacagacgcaattagtctgtcctattttactgccaaaatcccaattaggaggaaactatcatgaaaaaaactatgaatacaccagaactcacaaaccacctttacaaaatggcagaggatagcgctttgccatactatgtagtaaccggaatcatcaactgtattatccgattctacaacataacagacgggttctatgaagaacacgcaatatctgtattccgtcatttcctggaaacacaggaactgaatttcagtataatgctgtaatccagttcatacctgtactggtgtactttcagaatattcctattaaccaaaaagtaaacttgtcatcttactaaaattctggaggtttaagggttcgattcccttagcaggtactaggcatatagtttaaaatatgctataattttaccatatcagattcggaggtgaactgcatgaacattttaccagtagagagtttcagtaaaacatacctggaacattctattgtgattcacaactttgtcataaaagtcggatcgcagataaaagacagtttatgtcgtgtgtttggagataccgttcaatatgaatggcgtgaaaataactacaaggttattgttccggacgtgtctataatctgtaatatgagagatagaaaaaatatttcatttacaggaataccacgctttgttatggaagtgctgtccgattccacagagaagtatgatcgtggagaaaaaatgcagatatatgcgaaagtaggtgtagctgaatactggattgtagattggcgaaaaaaacaggtagagatttatttgtttgattttgatgaaaatgataaggtatatccatatttgtataaaacaattatgggagaaaataaagaagaactgggacttgtaatgtttcctaatcttcaaattacttttgatgaattgtttgatataccagagttctaatttaaaatccgaagtataaagcagtgataaaagaacaggaaaaccctgttcttttttttactcaaaattcaaaacaaaaacaggagggaaaccaaatatgacaagaaaagcaaagtacacaatttctgtaatcatctctgctacaatcggaattacaggaaactactgcaatgtatccgccaacgaaaacagaatttctgtaacagaagatgattctgtgatcactccaacagaacgaggattttatgctatggcaggagtgataaccgaaattgactgtgaagccgttgaaggatttgatgctttaacaatcgaatcaggcaatggaaatatctggacatactactcagacgcaaaagactggggaaccggagatatcatagtctgtactatggataacaagggaactgtttctgtgaaagatgatgaaattgtatcagcctcttattctggaacagccgaacagttttatgagctaatcaataaataacaggagaaagcacaatgtcacgtaaagagaaaaaagaaattatcaaagcaagtgctgtattcgcagcgctttttttaataggcggaattgccgggaaaatggattacgaaacagaaatcgggatccacaagacaacaggcacagtctgtgataataccattttgactgagaacggaagagattacactgtaaatggcttcaaagatggatccaaagtaactatcgaacttgatggacagggaaatattttgtctgttaaaagtaaataagcaaatcaatattatatatacacgggaggataatactaaaatgaatacaaaagtagaaaaatttattgatgaagatacaaatgcaacaatggtaatatctgtggaaacaaaatttagaagtacattcgatgaaatacttggatggaaatactccgaagaaggcaaaccgtatatgcagatgatcgactgtaaaaccagagggggttatgttttggagtacgatgtattctgtaaagagtacgcaaaaggcagaaaattaaatccaggtgaaattgtaacttttcaggatgtacctgttattggtatttctgaaacgaaaaacgcaaaagatcttgacatttggggcaacgcaaattatttaaaattcgtccataaaaaagtttctatcttcaatggaagaatcgaataccttaaagatgagctttcagaactggaagaggcaaaaaaggattttgcatatcatgtatttgaatatataaaagagcagtgtggcaacgcagatgcaatgtttaaacagaatctcattgctatggtaggtattccgggatttcatttgcttgaagaagctggatatattgaactggctgcaaatgtaaacggggatgagttgtatatcattcttgaagaattggaaattgaataaaagaaagaaggtaattttatggcaagaaaaatggggtggaaagcagaaatttctaatcttatgagagagttctgttttccaaaggaaacaattaacaggattattgctgatacacgagcagaatctcacaagggtgatacacctgaaatcaaatatgagagagcatggagaaaattcaaggctactctcgccactatgtaaacataaggcaactgaatattggtaaagccaaaagaaaataaatcaaagaaagaggtagttcaaatgaaagcattcacagaaatcaagaattttttaacaggtaacaaagcaaaagaggaagagtctaaaattctgacaccggaaatcttcaaacggaaacagatgtatgaaacagtaatgaatacccggcattttgttggcgtgaaagagttctgtttcattccgctggagttgctggagattgatgacagctatcagagattgaactgtattaacaaagagaaaatttatagtctggttaatcactttgatcagaataaatgcgacccaattcaggtatcaccacatccggaaacctatacatttgcagttaccaacggagttcacaggatgatgtgcgcccagatcagaaaagaaagtggaatcgaagcctgcattatgacaggtcttagttcagatcccgaacagagaagaattcaggaagcagctctctttgcaacacagaccgaccaggtagataatctgtctgcatcacagaagcacaacgcaaatgtagttagaggtattaaaaaatatgtggttcttgatgaatgtatcaaggggagaaaattagttgtggattgtaaacttatccgcaatcttcccaaagaaaaacaggatgaaatggctgattatagagtattgactggatatacagctgcattagcaacggctggactcgttgatggaaaggcaattctgacaaatattttagatattattgaaaaatcagcatggagaaattcagcatgtggatattctgtagatgtgatccgtacattgcagagcatccttattatgcataacaatgacaataaagtaatcaatgcgattattgattattttgtacatattgaaccaaaggaattcatggcacaggcttatgcagcttatccctccagaacacagaaagagagactttgcattcttctggaaaaggaaattgctgagagaaccggagaaaaaccgatgtatacaggcggagatatgagacttgtaaattcttctaataattttactcgtggtaaaaataaaaaagaagtggcataaatggttctgaactaattgatattagaaaaataaagaaaataaaataaatgcttgcattttcattttacaggtgctatactaatcacatcaacagaaaatatgttcgatttatttgtgcgattaccttacattacaaggcgtttgcacaagtgtatagcaccactgaacaatatttttttgggaagaactatttaatattagaaatataataacaacagaaaaggaatggaaacaatggaacagacgacaacatcaattccgaaagagaaaagcaaacaggaaagactgtttttaactaaacagggaaactttgtcacagaatgggatatcaaaaaggctgctcaaattattttcaatcaaaatttaacacagatcaattttgaccaatttattacaaattgtctgggaattgatgcagagcttgatccggatatggatacattaagcaaaatcaaaatacttttaaggcatggagaaatagtcagggcaatcagattgtattataacgattctgataaacagaagaccaccctcaaagaagctcgtgatgcgatttatcaattagaagcaactatgaaacagaatggagagttattatagtaatgcagaaaatagggaaatacaaaatggaaattattacagcccataacggggctgaagtaattcatattaaatctacagagtacgttcatactaagtatgacaaaattatgtcagattggagaaatcaggaacgaatcaaaagacagaaagcaaaaaagagtaaaagtaagatcattaatattttcagaaaaatagctgcataagcgagaggataacaaatgaatacagaaaataaagagataatgtcatttgcaggaacaagtacatcaaaggcaaataaagtgccgtattctaagatatttgaagaagtctacaatgacgatgggactgcaagatttatatcaagggaaagatttttgtatcctggagaagaaggagaagattatcttccgaagtttgaataccaatattttataaatgtagttgatatgggcgctatagagaaagataacaatactatacgcatcgagctgtctataattccgtgtcaagaatacgttcataaaaaaatcatagaacgtatccaagaagattacgatactacagaaatggtacaaacaagcgacctctgggattatctcaatcgtcctatcataacaacagaaaattttacatataacgaagaggatgtaccggatgtatggtatgactatttttataatccaacagcaaacaatacagttatagaaaaacttgattgtatagcaactatcctgccatgtattaatgcaagatttggatattatatggataaatataacaactatattggtacaactggatgggatttacttaaagatgatattctcggaaaagatttcttacaggaagctttgaagaggtttaatatctaaaaaacataaataaaaggagattttatcaatggaaaacatggaaaacaaagtaattgaatttaatggagagagagaaacaagagttgtcaaaaatcgtagaattgcttatgagctgcggaaattaggttataagattttgagaacagaacctaataaattccgtccggagcttgatgtctatatctttaagaatgaaaaaggtttaaaagaagaactgaacagattatgcgaggattataaagaacgtagaaatcagaatattgcgtaaataaaaaaacaggagaagaagttgcaatgaaacataatgttaaaacaaaagctgtgacaagtagacgtattgcatggagattgagaaaggagggatttaaaatcttatctgttgagcctgacagatcaaaaccggaatttgatgtatatatctttaaggtagtacctggctttcaagagaaattagaccagtttattcaggaatctgtcgaatatcgaaaagctcatcagatgggagcttgaatataaaaggtcaaggtaagtagctatggaagaaaataaggaacaagatgattatgtagtcatcagaaaaagtgcagtaaataagttgcgaaatggaatcaaaaatggatggcaaatgatgttgtattgtaaaatttatgcaatgtcagctcaaaaaggattttgtacagccaccaataaatattttgcaagttttattggcactacagaaagaaatatccaaaaatatttaagtgatctcaaagcgaaaggttttataaaaatctatgaagtcaaagcaggatcacatacagagtcaagaaaaatatatcctcaaataaatccagaagaaaatctaaataatccaatcaatctaagcaataataatccacccacgtccaatcattcatcccacccatgtccgactgttcatcccacccacgaacagttaggtcatgacccacgaacagttgggtcacaacccacgaacaaatgggtcgtaacccacgaacagttggacacccaagtaatagatagtaatagtatagtaatagatagtaacggagacgctgcggctgtagccttgctggatgtcgctgacgctccagaacgctccgcttcgctcgctcaacaacagaagtataacgaaatcgattttaatggattaataaaaaattctgatatgccaggtattatacaaaggcaatatgaaaaattaattttggaaaaggagttatctattgaagaaatagtggattcattattagatgaatttacaaccggattttataaatgtaatagagatgctgtaaaaacttatatcaattatttagtgtgcaaaggagaataaaattatgtgtagatttttatcaggtgtaatcatgaaaaacagagttgtgttagctcctatttataatcagagacattccggcttactgaagcagcttaacatcgaagataattatactaatgcttcacgtatttttgtgagagcagaattagttccaaaaaatgataacagaactactccagttgatgaatgggaatttattattgatcaggatgttacgccggactggttcgatattgatcgtggacggtatgaagaagaaatgagagaagctgcaaaagaatgggttaaagaaaatatcatggttgttgcaggctatgcatgggaaaaagtaaactatcgaggtgaaacacgctatattatgagcggtatttacaagaaaatgagttttggtaaaaataacaactatgcagaatctaatgtgctgaaagatttggatgaaagcaaacttttagcagacttaaaagctgagttcggagataaattaaaacctattgtaaccgatcttacgtcattagacggattcaaaacatatgggaaagttactgaccgttatctctctatccctacccaggagatgattatggaatgtggttctcagatgtcatgcacagacgcattttggttagcgacaccaaatcagaccacagatcgaggagatgcttcttgtgttcagtttgtcaacaggaatggcaattgcttctgcattgattgtgactggagtggccttggtgttcgcccgttttttattttagaatcttaaatctttaaatctttagataaaggtgcaaacagaaaccaagagacagggctagtgcgtaagcctagcccgtcaacagccaaaagcgactgaaaggagcgttatgaaagatgcaaaacttgatgtgattgtaaaggcaatagatttgatgcagtatacattaacaattacgtcaaatagaaaaagatatccagtaaaacatttgatcttaataagacggattcaagaaagatgtatggatatctatgagaatctactaaatgcaaacaggttacatgttgtaaattttaagcaagaacgtttaagtttacaaacaaaagcaatatcatgttgcgatcagttatcatgctatgttgaaatttccatgaaaatgaatctgattggaataaaaacagttgaatactggcaaaaacagattgaggatatcaagtatatgacaattgcatggagatcaaaggatcagaaaaggtaaaataattatttaggatgttcgttgtatggcttcttatgttcagattgtcaacaggaatggcaattgcaactacaatgattgtgactggaatgacaatggtgttcgcccgttcttggtcggaagacgaaaaaaagtaagtattagactgaaattagagtcccgattcaaaaagaatgaacatcctttcctaaaggtaaaacttcaggataaatataaaggaatatataaatggaaaatacaaaagttacagattttgaaaaggttacagatttcaatgtattgtataaagcttataaaagagcttgtgcagggaaaggatctgtaaatagcaaacaaaaatttagtattgccgcactggacggtatataccaaattaagagaagaatagaaacaaaaagttatgaagttggttcgtataattcatttaaaatatacgaaccaaaagaaagattagtcactgcaggtacatttgttgataaaattgtccaacatgcaatatgtgatagtatactacatccaaaattgcaaaaagaatttatacagaccaattacgctggtcagataaacaaaggcacagattatggattggactgtctaaaggcacaaatgtatttagcatactgcaagtatggatatgactgttggatagttaaagcagatattaagaagtatttttatagtattgatcatgagattctaaaagatatcgttcaatactttgtagacgataaagatttctattggttagtagaaaaatttattgataataccgaagggattggcattcctctgggaaatcagattagccaggtatttgctttaatgtatctgtcaggtctggatcattttgttacaggagaacttggtattaaatattacggacgatacatggatgatatatatttgcttgtcgagtcgagagaatatgcaaagttttgcctggaatccatttgccagtttgttgaatctttaaatatagagttaaacggaaaaacacagataattccattcaagaatggactgaaattttgtggattccatacatatgtaacaaaagatgggaagattatccggaaattgaccaatgaaaagaaacgagctaatcaaaagaaatataaacgcatggcaaaactgttgaaaaataataaaatttctaaaaatgaatttgaacaatcatacaactcttttagaaaccatatttcaaaaggaaactgtatgaagttcggattctctttagatgaaatgattaaaaatattactcagtgaggtgttgaagatgaaaaagaagaaaattaacaaggctatcgagagacttaataagtcagcacatcagacatataactacatggatgtgtttgtatatttaataaatacaaataaaattattaagatttcagaaggaactggcgataatcttcttcgtgaggatagggaagctggatatgtagattatatttactattcattctatgatatggatgatgaattttatgaatatgatggtggagaaattttgcttgaagagtatttcaaggataaatatgcttgtactaccgcctgtattgatgatgtaatgaaatttattgagtatgatggaaagtacattattctctcacagttttattatgagaaagacgaatggtatacagaaacatggactgattatgatattgcttatgcattatctgataatggaatttctgtcacacgtttaaatattaacgaaaccagagaaaaggcaaaacatttgtttgatgataaatcgtatagaaatgcaatgttatcagatttagtagtgcagttatttgcagtagaaaattaataacagtttacagtatataaaacaaaaggaggaagttattatggcagcaaatgtagaaagtatgtttagtgtaagagagacaccgtggcatggacttggaactattattcaggatgcaccaaattcaaaggaagcaatcagactggcaggacttgactggagagttgaccagtctgatgttttatgtgctgatgatggatctgtaattgaaggatataaagcaaatatcagaagctctgatggaaaagtgctcggtatggtaacagacagatatcgaattgtgcagaatgaagaggcattcgcttttacagatgcacttcttggagaaggagtacgttatgagactgccggatctttatcatctggacgtagagtttggatgttggcacgaatggaaggaaaaatgattactggagaagaggttgatccgtatctcgtatttaccaatagtcatgatggaaccggcgcaattagagttgctatcactccagttcgtgtcgtgtgtcagaacacattaaatcttgcattaaatacagcagcaaggcagtggagctgtattcatgttggacgaattgaagataaaatggaagaagcacgacatactcttttgaataccaatacatatatgaacgcactagaagaagagttcggagatttaaaacttcagaaaatggatgttgataaagtaagagaatatattaacatgcttattccagtagaagaaaatgatactccaagaaagaaacagaatattgaagaactgagaacggaacttatgaaccgatatcttttcgctccggatcttatgttggtagaacattctgcttacagatttataaatgcagttagtgattttgctacacataaaataccgaaacgaaatacctcaaattatcaggagaacttgtttatgaaaacagtagatggaaatgctctgattgacaaggcatataaaatgtgtgctgaagctgcatgaggtaaagcatatggagtttatggcaaaagataaagaagggaacccggtagagatacatatgacggtagatgggaaatactttgcgtatttcccgaatactcatgaatattctccagcttttatttttgagaaaggattgaaaaaatttctaaagatgaagcaatctgtaataatagaaaactaaaaggagacaaattatgaatacttgtattttatatttataccgagacgcatgtaactataaagtatataatgaagtaattattaatggagttttatcaccaggacaaatcaacttgattttagattgtttagatgatggtgaatactttattccaagtcaggtgggattaccagaacaaagatttgggagcattacagaagatgatcactgctggtttgaattaaaccgtgaaggatttaatttatcgactggtatttcaacaatagatatcactccttatgaattggtaaataaatttatgaaagcaaaagataactggaatgatgatattatgtcatttatgtagttcgtaaacggagggaaatcacatatgaaagaatacacaatagatgattttgatatggaaactgtattgtatgaagacagcggaaattggaaaaataaatcgccatatgagtattttattggggtacataaagaaggagaatttattattaattactctgacattcttacatttttaattcagacagcaggaaaaatatgtaaacgatatgcgagtgatctgtttattacgtggagcggtttggatgaaaaattacatgactcaaaatacacaggtgagaaactgttatttggattcagagaaaatgggatggattcaaatacatttgtactttctaggttgaatcactacggaaaaaaacagatgatacaagatatcaaagaattatacttgttaaatgtagaagtctatgatgaagaatctggcaaatatattactatgaaacttggaaaggcaacattaaaagagggaatataaaatggcaaataaaattatcaatgggaaaaaatatgagacagaaacagctgttatgaaagcatggaatgataataatggtaatccaaaagatatttattatcatatgcagaaactgtatcaaaaaagaaatggcgagttctttttgtgggaaacaggtgatattattactccattaacaaaaaatgaagcaaagaaatgggcggaaaagaatttaacaggaacggaatatgaagaagtgtttgatccagttgaagaataaaaggagctgatgatatgggcgatatattacttgaaaaattctttgagacatggcgttgggaagaggcgatagaaaatggtgtaataaaaggaattaataaaggagaattacgtaagctttgctctccggaagtaagaaatttgttattagacagaattattacgggcaagtatgatatcgctccaccacatcaggtaaggatcccaaaagataatggagactatcggatagtatatgtgaatgaaaatattgataggatattcctatcaattgtaaataatatgctgtttgaattattcccagatatgatacataaatcatgtaaaagctatcagaaagggattggttgcggaaaagtagttcaagaggcatcacgaaagatttgtgagacgagtatggagacatcaggtgtacttggatttaaggcggatttgtcaaaatatttcgattcagtgcctttggagtacatcatgcgagtgtttgatcacatagaggggcagatcggtttctcgtccataatttcagttttaagacgttactatatgtcgaacatttgttttaatacagaaggcaatctaattcagcattatcagagcttgaaacaagggtgtgcagttgctagttttttagctgacactatgttataccacattgatgaaatgttgagttctctccctggattttatgtccggtactcagatgatattctttacataggaaccaaaactgaaaaggcaatgggaattttacagcgagaactaaataaaatgcaaatgagactaaatcctaaaaaggtagagcagttatatgctgataagtggtttaaattcttaggattcacaatcaaatcagatcaaatatcattatcaaaaagtcgaatcaaatcattccaagacgaaatttccaatagaactataaaaaagaatatttcatataaaaatgcagtccatagtgtgaatcattatctttacattggtaatggtgaatattcctgggctacccaggtgctgcctattatcaatacacaaaaggatattaatacattgaatcaatatgtaatggactgtattcgggcatgtataacaggaaaaaagaaagtgggtggattaggatgtacagtggataaatcggattatacgattcttagagggacaggtaaaaatgtaacggaaaacagaagaaaaacagataaaagtatttctggttattacagtttgggttgtatgagaaatgcaatgcttacttgtaagccagtgtatgaaacgcttgtaagaagcttataagacagaaaggaaaagaattatgatagaaaacagaaaatggaaactcggagatgatctctcagtagaagataatttattagatgaaattacattcaaagaattaattactacgatacattgtaattgtcagtgtataactccggaaaatgtacaaagagaacttaatcgaattatggaaatccggatacaggatatgaaatatttattagaaaacaatatagatgaaatcattgagaaagcgattggagggaaaaataatgagtaaaaaagtaattactgaaatcaacaaaattgttaatccttgtgtatgtagtacatattatggtgatgcagaagcatatgcaagaatcgaatataagaacggaagacttagtatttgcggagttgttggaccgaaaaggaatggtgattgtaagggaggttgcggacagtgtgttgatgaaattagaagtggaaagccaactgaagattggacaaacgaaatgcttcagaaattctgtaatatttgggatgaatggcatcttaacgatatgcacccttattgcaagcacatgaaagagcttgggtgggtagagcagttgaaggaaaaagtaaaggttacaaaatgggataggacgaaagaaacttgggagaaggcaagggttgctgagaaaagagcgattgaatgtttgaaaaatggaaaaactttcgttccaacaccggaagaaacaatttatgcaaatgtcagttatggagtaacaacttacaacgatgaattaccagagcatccggagttttatgagtttaaagagagggattgtcttggacattcaaacgtggaatataaaacgagaggtcggatatctcacaaagaacatccgcttggatttattggaagatcatgtcctgtttgtgggcataaatacggaacatcttggattaaagaagaagttcctcaagatgttatagaatggttgttttctctttcggagtcaaaaacacacccacgctggctgtgaggtgatattaatatgagcaatgtatttttatataaagtaattaatagtgatgatcgagattgttgtgcttacatactgaatcagccgatgaggtttgagtgtgttcattattttggaggtgtaattttacaaggatcttgttattgcggtggtgaattcgcaccatacgaggaaatcaaaacagtcctaacagaagatgaatatgaagcactaataagctttaataaagaaattaaaaaaattggatgtggtgttaccgttggagatgaaagatataaaaaaggaattgaattatgtgaaggcatacaatatgtatatgacaaacttaattccgaagagaaccagaaaatatttgaagaggtccaagaggaagaaattagatacttaatggaagagtatagattaagtgatgaagatgtagagaagattttcaatgaatatgctttgatgtatcgagacaggagcatagttggatccatatacgaagattataatgatctgggatatgaagaagcctgggaactaggatatatcaaagagaacgatcttatttctacaaggtattttgatacagaaaaatttggagaggatttagtcaacgaagataataggtatttagaacttgatgatggaagaatagtttcattgaattattagggggatttaaatgggatggacttcgtatagagctacacattacaaaaatggtaaggtggatcgaaaagctgaaatggatgaaagatggacacagactgaaagtgacggattcccagaattgaatgttttgaaatctcgtatggttggcagtgtttattatgcagctattgaagtaaagagaaacggaattcgtgaacgtgtatttggacaagttgcattgacatctacaaaatggaatgatgggatgaattttggatataaggatatggatgaatctatggggtcatattgttatgattgtccggcatcagtcttgaatatgcttacaggaactgataatgagtatgcattggaatggcgtagaaaatgcagagagaagcttgaaaagagaaagcgacatgagacaaaagatacgttaccaataggcagtgtaattgaatttgaaagatgtgacggaagaagagttatattagaaaagatgaatccggaatttcaatttaaacgtccttggtggtttcaagaagataataatacatatgtatcattaaaagatattcctgaaaattttacgattatacgaaagggaagggagaataatcatgaataaaacaaaacagaatctggaaatcgaaaaaatgattgtgatatctacggcgcatattaaaaagaaaacagcggatatacttgaaacagctgcgttggatttagatgtgttaggttctatcactgtttatctcaaagagggacttggatattacatatattttaaccctgaacatcttgacgagattccaaatgatttacggaaatgtattgaatttgctgtaaaaaatggatgtactgtactatgtctggaaagagatggacagattgtggatgatcttccggaatatgactgggaagaagatgtaaagcaaaaatatctggttcagtattctgggaggttatttgtaaatgcacacaattctgatgaagcatgtgagattgcattggatcatatttctattgatgatattcatgctgaagtgtggaatggtaattaaataaaggagaagaaagtattatgtataaatatgcgatatcgttgtataaaaaagatggcatgtttaattatgcacaatacagaaataatctgtatgatatattgagaatttatatgcatgaaattcataccacgtgtaatcctcgtccaacattatggatttatgacggaaaacagtatgttaggattcatgattttatgtttaaggaattgacacctgaaacgtatgaattatatcttgaggaacgaattctggaatctgataaattgttggaaggagtcgatgaatgtataaattaacagatcagggaagagaaacagttgaacatcttataagagaatgtcaagccaaaagaaaagaaatattggacgctggtatagatactgctgatgaaacacatattccgacaatagaagatatagaaagtgatatagcagtatttatagatgcagatggagaatattataattgttggggagtaactgacaatgattcttctgattgtttgtacttaaaaataggcgtggattttacggaagtaaagtaatgattttatgggaggaaactgaaatgagagtaatcaatattaaatgggatacggatggtgatgaagatctgttaaagtcattaccaacagaaattgagattccagtcgaagctctggatggaattgaatatatggacgatgcagaagaaagaatatcgaattttattagcgcacaaacaggattttgtcattatggatatgaagttatagatgatgatgggttgttacagttctgcgaatttgcagaaggatatgtattaaccagtgaacagtaccagacgtataatataggttttaatgatgatgacgaaacacagtttgatgtatgtaatcttggagaattactaatatgttggtatgaattttgtaaagagaacaaatttcccataaattgttattgttatctggaacatgtaataagtgataaatattcagaattaattgacggagtaacatcatgctgcggatatgattttggaatagatatggacaaagcaaaattctgcccgatatgtggaaaaaaattgattagagaagaataggaaatcaggatttagttggggggatggtattacgattatcaaatcaaaatataatgaaggaagtgttaatcttaaagaaaaaggaaatgattgtgattttattgcgaccataaaaaaacaatacagataaaacgttaaaagtatttattgatgatttagaaggttggtacactgatccagttgtcattcctgctcatgattggattggttttttgtcggatgacacaggatattttcaagtagaatctattaaaaatggagattttaaagcaattctggtataactatgaaatcggaatttagttggagggtattaattatgtcagatcttacacatttatttaaagtaggtcagaaagtaagatgtaaattagatggaaatttttacagtggaacagtaaaagaaatattcatggatcacatcattgtggatataccagaaattaatgatcattgttggtttgaaacaggaattaatattgaggatgtttttccggattataatttcgaagaataggagaaaatttatggatacaagatttgaagaattaaaaaaagaactttttatgcagggattggatagtgttgaggaatttcttggttttgagattagtaatgattgggacggttgtactattgagaatgcaatgaacgatgtttatgagcagatgccagaagaagatttagaagagttttataagagattttgtatttaaaataggaggaataattatgggaagtttttcatttacgagggcagataaaacaactaaaagaaagaatttagtatatggagatcattataaaattctgatccctgaagagtttggaggcggctacattaaagatacgtattatgattatggatatgtatttcatgaggacgaagaaaaggaaaatgctgatttatgtggtatccttgcttattggaataaatgtgaaggaatgatttttgatggtgaggagtatccagccactatgaaagatatcctggaaagagggagaacatgtgaacagagcaatcgctgtaaaggaattggtattggctgctataaacaagatattgataaattaaaatatccgttaaaacttgtatcagcatcttataagggaacctatgaagaatgtaatatgagaagttatggggatcctgagcagggatttgtaaaaacttattggaaaaacgatgaggggtaaaaaatacgaagcatttgttatgcgataattagtttcgtattattttacattgctatacacataaataaatgccatccagaactaataggttttgttgagattctgtgatgttttatgattgcgattgcatttgtgttaataatagcaggaatgtaaagaaatcgtaatttaatttgaaaataaatatgtcttttctgcaaatagaaaaaagtgaaaggcgaaaaaatatgaatatcgaattaaataaatcaaacataaaaattgaaggaaataaacttatcgttgaattaacaccagagttaagatctatgttaaaaatacagcagaaacctttgaaaagtttagctccaggaacatgcattattgataacattggaaataaatggctgattatcagacatgattgtgataatacaacaaaggtatggagaaaagagttacttgatcgtacatataggtttgataataaatcaaataactttgcagtctctaaaatcaaagatattttgaataatgaaaatgggaagattttagcagatatttataaaggattcggaaagagaaatgtattaaatgatgcagttgatttaacttctcttgatggattggatacatacggtacatacgaatgtaaagtgcatttgggaacaattgatgattatagaagtgctagaaaaatgggattgttaagatcagaaaataaatttccattttggttagatacaccagatagtacaaatgaaaacgcttctgcttctttcgttcggattgtcaacaggggtggttggtgcgacttcgatatttgtttctggggtggccgtggcgttcgcccgtttgtatctttagatcctgaaatccttgtatctgtagaagatgaatcggaggtatgatggtatgaaatatgatgttgtgttaattgaaaaaccattctttgaagggatatcatttttagaaataaaaagtttatttaatttattgcttactgatgaagtatatccgattgaaattcagtccaattgtgaatcgtctgcaatgggatttataacatctgaagcggcggataaaattgattatgcatacgaaacaaatacttattttgcaaattttataacagatattcttgacgatatgaaaaatgagtctgaagatcatacatacgaattcaaaggtttaaagatttggctgggaagataggtaagtaaagatactaaatattccgtaaatagaggatgaaaaatatgagacacaataaatcaatcagaaaaaagaaacagaagataattggatggatgttatatatcgttggaatgatagtattctttttcgctctattatattctatgaagattagtgtgcaatctggagtatatactatattggcatctatggcagctatgtttgtgcttcagggagcttatgaaaagagtgtataaattctgaaatgtttgaatgaagctaaataaattatacgagagtgtactcatgatatacgagattgtaactatacttcaattatgcagctctgatatgactcatcctggctatcaccaggatgagtcatcctgatgctgcataatatcagacgattaaagaaatacaccaaagcaaatgagtatatcatattcaaaaaggaaggtgacagaatattgaatgatgcaaaaaacagtacaatctttgcaagctttatccgagatgttcgagagggatacaaatttgaagttgacttcaaaaaaaggcttatgaaaacttcaaaaggaatatacattttagatggagaatggaatcaatcatataaattgtatgacgatcctaaaacaaatacagaaacaatagacatgatggaatataggtataaacagtataaatactctgttccaagtaaggagtctgagaaacataaaaacaaatactttaaagcaaaacatgaatcggaactgacggatattgatatgatcactggggaaaatagaagcttggcccaggctgcacttgaaggttttatattatgtgctatcttatccggtgattttaaatgggatgaagagaaatatgggaaatggttttatcaaggcaaagataaagatttcattattttaagagaatgggttgaaccaaataaatgataaaggagatagatattatgaaaaacaatagagaaagtagtagacaggaagtattaaaacaggctggtattgatactaataattttttcagtatcacatttaatgaggggttaaaaccaggtgcaacaattcatgtttcaattgatcagccagagtatccagaagaagtccgaaatgaaagagaaaaagtcaggaatcaaattatagaagacggttatgtgagaaatacaaaattacatagaagatgggtaatggcccagatgtttagaatgttaaattatcacagctatcgtactggcaaagatgggtatgatgcatatctcgtagataattacagctatcattatcagtttactatgatgcttgaagaagtcagggtattatctaagcttgaaacaagagatccggaaagttttacggaaagatcacatttctttaattgtgatgttattgctgcaacattgaatgattatcttatgaaattaaaagattacatagcaagtgttcctgaaaaaatatacaaaacacaaaaatacaaaaaattattccagcaggatgtcttcttgaaagatatctataagacaatcatttatcctgagtatttagcagtaaataaagttctggatgttatcaaaagcaaagaaagaatgtcttatagtcaaatatataaggcattaaaaaaatgtgtcaatggcatgtatcgtttgcctgagtatacgccaaaatgtaaagaatggaaagacgcattcaagggagctggtagttattatacgttgatgaatatggtgaaatttcatggatgtttcttgtataattacaaggatgccgataatggttatcataaattcaatgcaatgtttggaacagaagcttgttattatttaaaagattgtttagatgagtataaaggagaatattatcgtatgtttgccttattaaagcaagttattaaggataataattttgacttctatacaagaatggcggaaatttattcataattttttctatataatattctttgtggtgtatatatagcacatttatacaaagtacaattctattcaatgctgatccaggaaggatggggatccccatcctcctggatcatttatatgagtctagtaaagagatatatatgtttgtattgagtataaataatattattataagtacaataaaacgggatgaaaaatactaataaaaaaataatacaaaaatctgttgcaaatgacaaaataatatgttataacatatattgtcagaaaaacagaactaatgtttgctatattggagggatttttatgaaaagtcaatgggtcttagtagttatgaaaaagggtaatagaaattgtgaagcactatggtttgaacacgaaaataaggcaaaagattttatagttcagaaatatcgtgaaagtatcaaaaaagctcccttttatgattttgaaaattcatatatatctgatgagcatacatacgcgaaagtaagttctggactatccagtataaagttgatgttatgtaaaaacatacgtcattataaatagtcattcatcttaaaaagatcagcggttattcgttggtctttttttattgcttaaaatagatcggagatgttaaaatgaaagaaactaacaatattgtcacattggacaatgttaataaactgactgaagtacattatacattaaatcatagcggaaaaatggaaggtatggcgagtttgtctaccagttgcacttgcaataaattttgccagcaaagatcagcaaatcagaatctagtatgcagccattgctatgcacaaagacagatgaagatgtatttaaatttggaacaatgcttaataaaaaatactgaagttttgacttcaagaatattagaagataaagaaattccaattatcaatcgtatgtattttcgttttgaagcgtttggagatttaattaatgtaactcaaatttccaattattttaatatctgtaaaaagaataaaaatgtaaaattcgcaatatggacaaagaatccgtggataattcaggaagcaataaatggaggcctaaaaaaaccatcaaacttgcagattattttaagcagtcctaaaataaatgaggtatgtgatggttcggaatatgattttgttgataaagtatttacagtatttactaaagaatacattgagaaaaaacatattcatattaactgtgggatgaaaaaatgtattgtatgtagaaagtgttataaaaagagcagagaaaaatttattaatgagaaacttaaatagtcaatatatggaggtgataacaatgggaaataaaagaaaggtacatattacatcatattttatatgttccgaatgcaacttagaaatgcctctaccaagagtgccgggagagatgcgaaaatatggacatattaaagatatttattgtccgagatgtaaaaaaacaactaaatttaaagagcttggccagcgtgattataaaaatatggcaggcgaagttctaacatcatttgaagactaaaatataatataaggagaaagaataaaatggacaatcatgaaagatggaaagcattagaggcatataaagaattgtattgggatgagtataagaaatctattaaaccagatactccagactgggaattataccatcatcctaagaatgcaaatgcaataggattaacaataatttgtacacctattttttacttatttgcaggtggtggatttgttcataatatcatatggacgattggtttatgggttttctgtggtatctattgtgcattatggaatttttgtttagataatgatgcggataatttatataaacgggatatagcatttatgatctggctgcagcatgaaaaaggaatctgtttataaggtggtgaatcaatgaataaacaaaggctgggagaaattaaaaagattattgataatgtaaatgaatgcaaaggtgatttagatgatgtaatggcagatgagcagattgcatttgataatatgccggaaaatcttcaattgtcgagtaacggagaaagatccgaagaagcgattgatatattagataacgctgtagaaaaattagatgaagtagtagagttacttaatacaatatattagttttgtttgatttggtccctggttaatcccagggactttttttaggaggtatatatgcaaaggtttttttatcaagatccttataatccagataaaacatgggaggtagtaaaactggtcggcggatactacctccggcagtacatcaaaggtaagcagtttgggcgcgggattcggaccacaaagaaatatattcagagtattgggatttttgagtatgtacaatgcaaaagaagcacaaggaatgaggtgttgaaatgaaattaaataaagaaaaatttcttaagacaaaatttggaagtagtatgatggaatgtgtaatagcttggaatcattggattgaccaaatatctgatgtaatacaacaccctgaacatgaagagtatataagaacaacaaaagcagtttattggtgtcaggcacaatgggaagtgtatcaaatggcagttaaacagttttatggaattgagtattttatgacacgtacagatgaatactttggaatttgtacttctgatgaaagtgattggctattaaagattgaaagagagggaaaaatatgagtggattacaagattatgattcattatatcaaagcaaaatttctgctttaacaaagaataatagagtattagagaatttttattactttatttcggggaatgcaactttatccacctgctacacgtatttatcttatgtatcaaggtttttgaatgtagtaagaaaaccagtagaagaattatctgtagaagattttatgatttatcttgccaaatttaacaatacgcagcccaatagtaagcagtattcttcttcttataaaatagatatttatcaggcattaaaaaggtttggtaaatttttggtggcaacaagaaaaattaaagaaaatcctatggattacatagaacgtcctaaatttaaggaaaaccagcagacgattacaaaaagagaagaaggatatttaaatgagaaagaaataaagaaatatcttaatgatgtagaagctctggcagatccggaatggagatggagagatttgtctatgataatggtatttattaataccggtattcgagcatctgctctatataaattagatattgacagtataaatttttctgaccatacaattatagtaactgataaagagcaacgtgtaaaaagaaaaaagttatctgaccaaactattacttgccttctaaaatggttggaagacagggagcagcttctcagaggaaagcatattaatgctttatttatctctaatcgcagaactcgtataagtcaacatgcaatatctaatattgtaaaaaaatactcaatcaatatcaatgggaaaaatattactccacacaaacttagagcaagttatggaactattatgtataataaaacacacgatatttattttgtgcagaaatgcttagaccatgcgagtccacagacatctgaattatatgtaagggggcagcaagaccgctctgagataaaagctgaaaaattgatggcagaactattttctgacaatactactaatcgttattagaaaaaagtggacatattataataaagcgtgtataatagatataaatggaggtaggtattatgagagaaacacagtcaatagaggtagaaaaatttgaaaatagtagtcttgaacgagaaacatataaacatcctgcatttggaatgattgggtttagccgtattacaggtggggacaatgtattattcgggagtagtatcaaacataatgatcgtattcagttgacgattaaacatgctgaacaagatagaacactgcatgatgatcattactatggaaggaaaacaattatcgaaattgagatgagctattctcagtttgcagaatgtattactgcaatgaatgtaggaaatggtgtgccatgtactatccaatatacagaaaaggacggacgtattccggcaatcgaagaaaataattctaaacgagaacagtttagaaacgaatttagtgatacgatttcaaaagcaatggaacaggtacagatgcaaatcaatcagattcaggaatctattgacacaaagaaaagtcttggcgttaaagatcgaaaagaaattatatcacagcttcaacaagtgaaatataacattggatgtaatcttgatttctgtgtaagtcagtttgacgaacagatggacaagagtacgatggaagcaaaaggcgaaattgaagcgttttgccagaacaagattaacagtattgctcaggctgcgttagttgagaaaaaagatgagttgatcggactggagaatcccgtggaattatgaggggagaaaagaaaatatggataaacaatataatgaatgtaacaaagactgtaacaaatgcaaaaaattaaatacacgtacagatgataaaggatatgtatatggatatgagtgtgtgaaatatggagattctgtactaagatcggaattcgcgtccacaaaaaaatttataaggaggtagacattatgcatagttttcatggaaaatcagtaaatattcattatgatgcagatgtaaaaactggagaatgtattataacaaataaagaaaatggacaagaaattcgtgtgcttggaagtgatcttctggattttgttgcaggatatgtaagagaacagaagattgtcaaaatagaaagtgcaggcactactgatatacttggaatataaaataaaagattgattttataaggaaaaattatggaaagattagttatgttaaaagaagaaatggattgtattatcaaaaatatcactgcaagtagagcaatattgtcgaatgtaatgaatgaagtagcaaacaataaataaaaatatcaaaagattacaactcaaataattggtttgtcaaaagcaatcaataaaatacaagatattttaaatagataaatataggtttcatgctgatttagataacagaaaggaaagataatatgactccaaaagaaagattcaatagtgtaaaacagattttagaagaaaatgatttgtcggttaacactttgaatattaaacagtttgataaggtatcagaattacagttaatcgcaggtgcaaaagatattgtgaaaaaaataaaaagatatgaagagcatcttgattctaataacatgaaatatcctgaatatattatgatgtgtgtgagacagaatttaggcttagacgaaacagatgtgagtagagatatggaaatctattcgatgagcagaaaagaaatttttaacgcagtatgcacatggaacggattaattggatatggaaatacaatagcagattggatagaagatatttacaaaattagcttaaacgattgattggatggtggatatatatttaaaatagaagttgattatgtacagggaagttattgcagaaagatggattggagcgaaataagatgaaaaatctatttgaaaatgtaacggataataatttaaagtccatatatgaagaaatatttatagcaagagaagaaggactgcgaccaagaattttagatccttatattcaaaaagtgagagatgtttataatctttctgtttcagatggatggaaatttacagaagaattattttgggaagaagtagcaagaagatattttgaaaacaaggtataagtttcgtaaggaggatttatgaataaacaaattcaaattatgtggctgcgagaaactgctaactgcgtagtggaagaatataatgacggaatcttagaatgcactaaaaacagatatggaaatagaaccatggaacattgcaaaggttatgattttataataattaaattatctaatttagaagaattattttcagatattagacaaaaatattatggaaaaaatgtttggttgctattagacctataaattgcagaggtatcaagtcatgaaagaaataactatacaggaaatgaaaccattacaggcatacgaagtagttactccaagctctgacggaacatttgctgcaggcgatgtgatatggatgtcaaatgatggaagtatttcaattgctggccctggaagtggatgtataaatgcagatgaattggtgaatgggacagcagattttacggtgaaagaaagtaaagaatatgtaatatatcgccatggatgtacagaaggtattcttaaaagcgtataaaacagatttataaatgatgtaatactttatgcagaacatattatgaatttaaagtcgaaactaaatgaatctcacaaaaatatagcaaagttaaaagcgaggtatatatgacaaacagaaagaatttagaagaaataatagtaaatgatttcaggaaaatcatgctcaacaaagaaaaagaattaaatatgtataaatatgcttatcagaaatataatttttcaatggctatattttctgattatgtgtcagaaagagagaatatcaaagatgtaagtaagattgatttatttataatgcttgatagttgtgaacatgcattagaaaagaaagaatctttgttacctgattttttttctgaaaaagaaatagaggattttcaaaaaataaaattaaaagaagaagatttgaaatttccgctgatttttaatatgatccaagtagcgtcagatcaatggataggttctgttgatgctaagactatcagcatattattcgaccatcatctgatgaattataatacagaaacacaaagaacaatgtatcatattaaattaaagaatggggatgatcactataaaataagagttgacaaaaaagcagttcagcagattacagatgaattaataaaccatacatacatatctgatgatattactttgaatataccagagggacaagaagattttgtatatgatagtcattcaaaacgattgattattaattcaataaaaacgttggatattatagacggctatcagcggtgtatcagtatgaatagagcgagtatacttgatgaagattttaactatcctatggaattaagaataacacattttaatacggaaaaacttcaacgatttatttatcaaaaagatcaaaatacaaaaatgtccacagtaaattctgattcatataatgtgtattctccacaaattataattgccaataaagtaaatacaagcagctcatgtaatatcaaaggatatattggaagaaatcaaagtcagattaatcttgcgaaattttctgaattgataaatttattatttttaaataagtttattagcaaaacagaagaacagagaagaattttggaagtaacaaaagaaattattgatgattttaacattttaacagaagaagatccgagttttctcgacattaaatacgatataaaaacattgacatgtgtgatgtgtgtatttaaatatatgtcaggaaaaacagataaaagcggaatatcaaaattagttagagatgctattaaaggaagcgaaaatattaacaaggtaagattttatgagtcacgaaaaatatctgctcctactattaataaaattatggatatcgtaaaaggagttgatttgaatgtataatgaatctataaagcaaatgtttataaaatctaaaaaggataataatacctttattgatacaattttgttatcttgttttgaaaaaacaagtatatttgaggaaatgtttcaaaaggatgtatctgaattcggaatgaaagaaattattgatatgtataaaatattgaatatggattcattcgatgtattggctgtatttaattctaatttatttcaatatacgcagttctgtttagaacgaggattgatatacagcaatcgaaatgtatatcaggaaattacttctgatatattaattcagtgtttaaataagtcattaataaacagacaaataatatccagagaagatattcttagttatgttgcaaggttaaagaactatagagataaattcatcatgttatcactctttgaatttggaaccggaaaaaagaattatgaagatatttcccatgccaagattaaggatatagacaaagaaaagaaaaagataaaactatattctggcagaatagtaaatattagtccggaattgatttctattgctgaaggaagtgtagaacaagaatattatcgaagcgatatgttagagactcttcttattgatgacgggaccattattaaaaagaaaaataattgtatcaatattaatgatgattttggaagtggaagatcaatttacttaacaattaaaaaatctttagatgattgggggatttcggaatatataaattctaataaaatagttatttctggggagatacattatgtaaaaagcgaagcgaagagactaggattatcacccaatgaatatttaaaaaaattcaaatataaagtatcaaaccaatttggtaaaaaaattgttatgaaaacatttttattaaaatatagcgattatttatgatcgctatattttaataagatgaactggtagatattagaaaatggaggtaaagtatggatatacaacgattaaagtttttggtaaatgaactgaataaatatagagatgcttactataatcgctcagaatcattggtttcagatgaatattatgatcagctttttgatcagctgaaagtgatggaggcaagcacaggaattgtgatggcaaattcgcccactcaaaatgtaggatatgaagtcaaatccaatcttgagaagacaacacatagtcatccaatgttatcattggacaagacaaaagatattgatgaaatcaaaaagtttgtaggtgatcaactatgcttattgatgtgtaaaatggatggattaactgtgttgcttacatacgaagatggctatttagtccaggccgaaacaagaggaaatggagaagtaggagaaattgtgacacataatgcaaaggtatttgataacattccgttatatattgattatcctggtcatcttgaagtcgaaggtgaggccataataacatataatgatttcaataagattaatagcaatatatcagacgatgataaaaaatataagaatcctagaaaccttgtatctggatctgtaagacaattagacagtcatatcgcagcaaaacgtcatattaagtttattgcatggaaaattccgaaaggaatggataacattggagctatgtatgaaagattaaactttgcatataacttaggattcgatgtggttccaacaatcggagttggtatacagcatactactatcgaagataatataaaagaattaaaggatcgtgcaagaaaacttggttatcctattgatggaatggttgtgacatatgatgacattaaatatggtgaatctcttggtcgtacagatcatcacccaaaacattcattggcatttaaattctatgatgaagaagcggagactgtattaaggaatattgaatggacaatgggtaaaaccgggcagcttacacctgtagcggtatttgatccagtagagattgatggaactatagttgaaagagcatccttgcacaatgtaagtattatgaaagaacttgaactttcttatggcgatacagtaacagtttataaggcgaatatgattattccacagattaagaataatctggatagaagcttaattgatatttgcactcctcctttacaatgccctatatgtggtcacgatacaaaggttgtaaaagaaaaagacacagaagtattaatgtgcatgaatgctatgtgtaaaggaaagcttcttggcgaattaactgcctttgtcagtaaaaaagctcatgatattcaagggttgtcagaagccacattatccttattaatacagacgggactggttgaatctgccgttgacttatatcatttaagtgacaagcgaaaagaaatgagttattttccaagaatgggcgttaagaaaatagaaaatattttgaaatcaattgaaaaaagtcgaatgacttcattgtcaaaatttattgcaggattaaatattccattgatcggcggtacagcaagcaaagatattgaaaagtacgaaattaaaaaggcttatttaataggatacgactacgcagtagattgttttatcgaagacatagaaaatgattttgattttacatgcattgacggcattggggatgaacggagtttatcaattcataaatattatgaagaaaataaagaatatatcaattgtttattaaaagaattccacttcccggaattgaaaaagaaggataatgtggttacagaggatccagcaagtctcgcaggtaaaaaattctgtatcacaggttctctctcagtatttaaaaatagggatgaattaaaggaagatattgagacgaaaggtggaaaggttgtgtccagcgtaactaagcaaacagactatttgatcactaataataaaaacagtggatcgagtaaaaacaaaaaagctgcagagctttgtattcctattataacagagcaagaatatctaaaaatataacctatactaattgatattagaaaacgcttgacaaatatatggaggagtgatatattatatgcatcaaagaaaggaaaagaaattaaatgaactattttatgttacagtcaagtaacgggcggtatctagccagagctggtacaaattattatttaaccacatctatagaacatgccctaaaagacaaaccagtaaagctaagtaatattcaaaattctattccaaaaaatctacaaatctataaaccattcaaattaatatcatataatactgaatccaaaaagatatcccaattaaaatatcaaaaagaaaatatcgtagaaattaaaaagcatatatcagatctccaattagatcttcagtcagttatttctcaggaaaatgaattcaaaagtaatttacaagatatagatcaagagttaagcgatattatgcattatattggtaagcgcaaaataattcgacggattgtgttgccctaaaaatcattccataataatcattagagaatgcaagcatttcacttcatcttctcttgctagaaatgatagatgcgagcattttactctatccgatttatggaggtgtgctcatgagaagcaaaagaatacctgccgaaaaacaataccgtctcatcatggaatgccgtcaaagtggattgacagatcatcaatggtgtgtggaacacgacatcaaaccgggaactttttacaactgggtaaaaaggctgcgtcagaaaggttgtgtggatttgccagcgtcaaccggacgcagttatagtgcaccggaaagccaggaagttgtcagagtggattttcatgatactgacccgctcccatatgaacagccattaaatgtgattccggtggctgcggaaagaaataacctttctgtagcagagccaatgaagctgtctgtaggaagttttcatctaacaataccaaatggaacagatcctcagcttctggctcaaacgcttcgcattgtgaaggagttggaatgttaggggatatcacagccgccgatgaaatctatatcgtaacaggcagaacggatatgcggaaatccattgacgggctgtgtgctattgtagaggatcaactccatatggagccaaggcgaagcgccctgtatcttttctgtggaaaacgttgtgacaggatcaaagctttgctctgggaatctgacggatttgtgctgctgtataaacgtatggaagtccagggcagattccgctggcccagaaatcagctggaagtaaagcaactgacctggcagcaattcgactggctcatgtccggtcttgaaatcgaacaaccaaaagcattcaaacctaccgaatgatcgtgtaaaacctctatgccagccaacaaaaatggagagctttccacaccctgtatcatgtctgcaatcccttgtaaatactgggtgttctgcttctttttcattgctttttatggtataataagagcagtaaaaaaggagcagaaaacatatggctggtaattcaaaagattcaaaaatccttgcgtacaaggacatgatcagccaactgaataaaacgatttccgcacagacagaactgatccagtctttacaaaaaacattggaagcagaccgtctggaaaaagaaaatcttcgtcagcagattgaatatctcacgaagaagctctttggtacttccagtgaaaaacggaaagatatcgatggtcagctgaatctttttgatgaagccgagcaggaagcagatccgacatggaaacaggaacttcctgatgacatcactgttccggaacataagcgaaaagcacgacggacacatgcggatctctttaaaaatgttccttcctgcgacgagatcatttctcttccggaggaggagcgaaactgtccagcctgcggaacgcagatggaatgtattgggaaagaattcgtccgccatgaattccggtttacccctgccaaagggaaagtagtaaatatctatcgtgaaacctataaatgcccggagtgtgccatatcagaggaacacccggatgatcagacatttgtcaaagcgcctgttcaggaaccattgatcccggaaagttatgcatcggaatccgttgtaggatgggcaatgcaccagaagtaccagaatggtctgccattaaaccggcaggaatcggaatggaagcagctgggtgtcccattaagccgggctacgcttgctaactgggtcatttactgtgccgagaattacctctgtcatgtttatgattattttcaccgtcagttacggatgcgtaaatatctgatggcagatgaaacccgggttcaggtactgaatgagccggagcgcaatcctgaaacagattcctggatgtggctcttccgcagtggagaagatggacttccgccgatcctgctctatcattacacagagacaagggcaaagttccatgcagcatctttcctgcaggggttccgtggatatctggagaccgacggataccagggttataacaatctgccggatatcaaacgctgctcttgctgggcacatgtgagacgttatttcacagatgccataccgaaagggaaagagtatgattacagccttccggcggtgcagggagtacaattctgttccaggctgtttgattgtgagcggtactcaaaagcaagaaatcatactgcggagcagagaaaacagttccgtcttgaaaaggagaagccgatactggaggcattctggaattggctggatcaacagcgtccaaacaagggaacccgtttggcgaaagcggtgaactatgcccaaaatcggaaaggcaccctgatgacctatctggaagacggtcattgcagtttatccaataatcttagcgagaatgcaatcagaccattcactgttggccgtaagaactggctgttcagtgccagtccgaagggagctgcctctagcgctattgtgtatacaatggttgagatggcaaaagcgaatgacctgaatacctacaaatatctgacatacctcttatcacagcggccagacgctaaaatgtcagatgaacagctggaacagcttgccccatggagcgagactgcgaaagcgaactgtcaaaactaaacatagagtaaaacgcttgcatctatcattttggtgcaagcgtgattcatgggcagcgtagcaatattttgcgcttacttatattgaatttcatcgtttttcagccagtgaaggatacaaattatgcaaaagaatccaagaattacgagatatacgaagagatttaaaaaataaaatagaaatggtgaatatattaaaaacaggaagctgtcaaaaaattgcagacggagatatattggaaagtttaaatcgggtagaccacaaaatatattgcccaagaaaattaaccacactttttatcaatggaaagaaccgagaaagagaaaatgtggaaataaattattaataaataaagggagaaaagaaatgagattcgaagaatttgtaaaaaagatgcagacacattttaatcagatgtgtaaaaatgtaacacgactttatgtgacagatacggatccggacgagatgtacaatttatatcttgattcatatccagcagggaccaatgaaatttatcgtgtaagaagagagtacgattgtggatgctgcagacattttattaagaatatgggtaatgttgtggcaatcaaggatgaaaaagtacatacaatctgggatattccaggattagatgatggtgtttattcagtagtggcacagaagatgaatgaatatgttttatctcataagattgtagatgtaagaattcgaacagaaaaaagaatcggcacagatcacagtatggaacgtattgttgccacatcacagattaatagatacgatcatttctttatgaatattccggatcgtttagtttttagaggttacgatatcaatggagaaaaagcaaaattaagagatacaagaaatgtatttaaacgttctctggatgagattacaaaggatgccgtagatacggtgcttgaactgatcggacaaaactctttatacagaggagcagaatggaaagctgcattaacagaattcaaaaaatatcataaagaatataacaaacttacctccgaaaaggacaaagaactgtacacttgggacaagtcagcagaagcaggaatgtctgttggcaggattcgtaatcacagtatgggaactttgttggtaaatatctctgaaggaatggatcttgataccgcagtaagcaaatatgaaaagtttgtagcaccagagaactacaaacgtccaaatgcaatctttacaaagaaaatgcttgaagatgccaagaaaacgatttcagaacttggatatatggattcattaaacagaagatttgctacactggatgatattaccgtaaataatattttgttctcgaataaggatgcagcgaaacgtattgttggaggatcaagtctgtttgacgaaatggaagcggatgtggcaattaatccaaagaagttctctaaagtggaagaagtcaatgtaaatgattttgttaataacattcttcctgacgcaaaagagattgaagtatatttggaaaatcagcatgtaagaaacatggtttcacttattgccccagagattagagatgcaaaaacaatgtttaaatggaataacccgtattcatgggcttatacaggaaatattgcggattccagtatcaaggaaaatgtaaaagatgcaggcggagctgttgatggagtattaaggtttagtattatgtggaatgacggagatggcaatgataatagtgaccttgatgcacattgcattgaaccagatggtggaatcgagatttactttggtcatacaaaatcatacgaaacgggcggtaatcttgatattgatattactcgtccaatgagacaaagacctggaaaacctgcagtggaaaatattacatacccaagtaaatctaaaatgattcctggaatatatcaattatatgttaatcagtatagagcagaaagaagccagggatttaaagcggagattgaatttgatggagaagttcacagttttgaatatcctcatcctgtagttggaaatgtttatgtggctgacattattcttgacaaagatggtaaattcaaaattattgaaaaattaaaaggcaattcagaagttagaagtaaagaggtatggggtgttcataccaatcagtttactcctgtatctgttgtatgctattcaccgaattattgggatgaacagacaggaattggtcatcagcacttattctttatgttaaaggactgtgtgaatccagaggaaccaaatggatactataatgagtatctgaaaccggagcttgaaaaacatagaagagtatttgaagctcttggtgcaaaggcacatgtaaaagatgtggaagatcagctatcaggagttgggtttagtcttactaagagagttgaacttgttgtaaaagttaagggaaatatggaaagaattttgagaatcaaattttaaagaagtgaaatttatattagaaaaggagaatacaaacatgagtgaaagaaacatttttgaacaggcagcacgaggtaaatacagatttccatttagaggactttgtacagttgaagatctgtgggacttaaatgttaccaatcttgatttagtatttaaggaactgaacagacagaaaaagaacaacagtgaggagagtctgctggataccagatccaatgaagatgtagtgcttgatgatatgattgagattgtaaaacatattgtatctgttaaacagaaagagcagactgatcgccttcttgccaaagaacaaaaagaaaaagaacagcgtattatggacattatcaaaagaaaagagaatgaagaacttgagaatatgtctattgctgaacttacaaatatgattaaaaaacaaaaatgaaggagtaataacaagtgaaaggactaacaagtaaacaggttttagaaaatagagagaggtacgggagcaataagctcccggaaccgaagctcaagaaatggtatgaatttgcattagatgcattaaaagaaccaattacaatgattcttattgcaatcgcaatattacagattgttttaggatttttaggtgtaatggaatttaccgatccgattatgattatatttgttcttgctattgtaactgcaattgcagtaaaaactggtcttggagttcagagagcggcaaaggaactaagagataaaacatcaattagattttgtaatgtaatacgagacggtaaaatacagaatataaataaggatgaaattgtagttggtgatattgtctgtattgagacaggacaggagatttttgcagatggttatattattgaagggaaaatctcagtaaataatgcagcaatcaacggagagacaaaagagtgtaagaaaacacctgtcattggatataaacatgtaaaaactacatctacagatgcttatacaaatcagaattgtttgtttgcaggaacgattgttatgtctggtgaaggaaaaatgatcgtaacagatgttggaaccaatacagtaaatggtgatacactggtaaaaatgcaaactctcgaagcgccaaaaacagcattagatatagcacttgataatttaagcaaatttatttcaaaatggggaaccattgctgcggcgattacctttgtcattctttcgatatcaggtattatgcaggcaggtggcgtaaatcagtatcttaatgatggtatccttcagacaatccaaaaactcgcacaaaacttttctattgcattaacaataattgtagctgcagttccagaaggtcttcctttaattgtaaaattagtaacaaaacagaatgtaaaaacaatggaacgcagtaatatcttagcaaaaaatccaaataaaatcccagaaacagcatatttaaatatcatttgtacagataaaacaggaacattaacaacaggaattatgacacctaaaaaggtagtcgatggaagcggaaaaatcgtagaaaaaaattctactttatttaataaaataaaaattgatatttgtcttaataatagcgctatgtatgattcaaatggagatattataggcggaaattcaattgatcgagcagtattaacccttgttggtaaagaagattattcaaacattaaaggaaatattccaattaaatcaaagcaggtgtttagtagtacaaataaatattctgctatcacaacaggaactggagcttcttattataagggggcacctgagaaattgatcgacagatgtataaagtattttgatggtgataatgaagtggatcttgattctgcagcaagagaaaaacttgacaatgcaatcaaatctatgacagaaaatgctatgcggtgtattgcacttacatattgtgaaggagatcttgaggaagatattcttccagataatatgacacttttaggtgtgattggagtagtagatcctgttagaccagaagttcctactgcagtagaaacggcacataatgcaggaattcaggtaatcgagattacaggtgactgtatcgaaactgctgtggccgtagcaaaagagtgcggaatttataaatatggcgatgtggctattacaaatgatgaatttgaaaaactgacagatgatgaagtaaagagaattattccatcgctgagagtaatttcaagatgttcgccgagcacaaagcttcgtcttgtgacactaattcaggaacttggtttatctgttgctatgacaggtgatggtgtaaatgactctcctgcgctgaaaagagcagatgttggattcggaatgcagagtggatctgatgtagcaaaggaagcttctgacattgttcttacagatgataacttcgcaagcgttgttaagtctgtagaacttggaaggacatttatgcacaatattatgatgttccttgagtttcagcttccaattaacatctcgctacttatcctgagtgtattatacccgattgttgctggaactgcgttgttggcttctgtacagattcttattgtaaatattattatggactctctgaactctctgagttttggtggagagccaccgaaagcagagtacatgaaagagaaaccgatcacgaaaggatctggattatttattcgtggtgcaaaagggcgtatagcattaagttcagcagtattcgtattgttatatatgattatcactgttacaccagttgctaatttcttcgcaacagatgcggaagctcttacagcaagattcgcattgttatgctttatggctgtatttaatgggtttaatatccgtacagataaaataaatctatttaatggtattacaaaaaataaactgtttgtatatattgcaattggaatttttgctatgaccgtgcttctttgtaatgtagtgagcggattaattcagacaacatctttagatgtgacacactggatcgtagtagctgtgcttgcgttcatggtaattccggcagacttattaagaaaaacaattttatattttaagagaaaagaaggagaaaattaaatatgggtttttttaagggattatttggaaagaaagatgaaacagtaaatgtgggtgcagcgtccaatgagacacttgctcctgcaagtaataattctatggcagtgattgatatgtctaaatctaaagaaaatcttaataaggttttgattgacatgtcaaaaaatgccaaaatcgatatgacaaaacataaggcaagagtagcgcttgcaatggattattctggcagcatggaacgactgttttgtaatggatccgtacagaagacagtatccagacttttacctattgcattacgatttgatgataatggagaacttgagtcatggttattctcaaatgatttcaaaagactgaaagcagttaatgaaaataattatgaggattatgtagaaaaggtaatgcagaagtctggaatgtggatgggcggaacacaatatgcgccggtattagaagatatcgttcattattataaagacattgaaccgagcaatattccttcatttattatttttattacagatggagagaatatggatcatgataagactgatcgaattgtaagagagttatcaaattataatctgtttgtacagtttattggaattggaaatgaaagattcagttatcttcgttctcttgataatctttcaggtcggacacatgacaacacaggttttatttctgtaaaagatatgaatcagatggatgatgagcagctttacacagaaattttaagacagtataaagaatggctcaataaaaagtaaaaaataagaaagataagaggtaatttaatatggcagttattaatatgagtaaaaatcagaaaatcaatatgacaaaagaagatggaacagcggtaagaaactttttcattggagtgaattgggatcagaacaggtatgcaggtgagtctgatattgactttgatattcatggatttcttacacagtctgatcgtaaagttgcatatccgcaagacattgtaaattataatacatataaccagtccgattatccgtgggttgagttctctggagataatagaacaggagaggattcttctggcattgtatttgatggaaaacattatgatgagtatttcattgtccatgcagatcagttcccggcggacagaacagaattttctgtatgtcttacaattttcagagcagtgcagagacttcagaattttggaatggtcaataatgcaatcatgactatttgtgattatgacaatccgagcggagataaatatgaatatgatctttctgagaatgaaaagtttgaggatctgaatgcagtcgagatgggaagactatataaatatggaaacggatttaagttccaggctcttggttctgggtacgttggaggtatgacagaactgtttaagaactttggattagatattgatgagggaagggattgatatgaacacatcagcagtagcagtattagcgattattgtcctctgtgtgggattagtattactttttggaactaaatcaggtaaacgtgtcagacttagagcgtctggcacggctgatgaaattattgcaaaagatgcttctacacctgaaggagcaaaggcgtattacaatgtggcaatcgaaaagaaaaataatgatgttattcaggcgagaacagtatattctcaaatgcttggaaaaatttcaaattttgatgatcagcttagatcgttaaagaaagatgcaatgcgagtaaaactcgatattcagtcatgcattgataaaaatgatgatgatggagcaagaatatatcttaagaagcagcaggatattgaagaaaagatggaaattataaagaatgcattagaagagttaaaagaaaatgctagcctgcagaaagaaacacttgagacattagagactgagctggaagatttaaaagccgaaaaagataatgctgtacttacattagagacagcacaggtaacgaagtcactgcaggcaacagtcggttcttctaataaggaagaagataaaatgcttgaaaaggtacgtgacggaattaagaagcaaaaagaagaagctgacggaactaaaattgcttatgaaaactccacatctgtacagcagcagcgtcttgataaaaaaatgaaagacgatgagattgaaaagaaactcagagatcttaaagcaaagaaaggtaaataaaatatgattgtattgaacgttggtgtatttgcaatatgcattattgtatcttttgtagcaggttttattattggtattaaaaggagtaaaagagtatgaaaaactggaaattaccattaattattatgggaacagtgttagtagtggtttttggatgtatttttggaatacaatcttctcagaataaggcaattagtttggaagaatcagtttataccgctgaatctgatattaaagtacaggagaaacgcagagtggatttggtttataatttggcagactgtgtaaaacagtacgacaaacatgaatcagaaacattgactggacttgcagatggtatgagtaaagggaatagtatcgaagatgtgaatactgcgattgcagcagttacatatgcttacccagaactgaaaagtaatgataactacaagcagcttatgaatgagttgtctattactgaaaatatgattgcacagtatagggaaaattataacaaatctgtaaatgcgtataatagatatacaaagaagtttccaacaagaatgtttttgaattggaccggatatgaaaataaagaatttaatagattggattatcaggctcctgtagatgcgccacagaaactcttcggagattaagtatggaaataacaaaacgtgagatcatagttagtattgctatcatatctgttatgttagttgtcggattttttatatccggcaacataacagattatcaaaatgataaaaatgctgaatatcagaaagcggtaaaaatagaagatcctgaaatgtttcagtatggaatggatacaaatataggtaatgcttttatatatggggatcttgtagcagcggatccggtttcgtttgatgaaatcggaggtgaatatttatatgttgaaaaggtagaggaacattataatagacatacaagaactgtaacaaaaacaaaacgtgatagtaaagggaaaactcacacatatacagaaacagaagtttattattcatgggattattatgatagttggattaaacatagtaaaaaagtgaaattttgtgatgttccttttgattatgaaaagattgatattccttccagcgaatatattaataccatagaagagagtgcagatgtacgatttgcgtattatggaattcctgcaaaacatgttggaacaatatatactcaattattagataatacaatatcagataatactatattctataaagattgtacaattgaggaagtattagatatatatattacaaatggagataatatctcattttggattatatggataattctaatcggaatatgcgtatatggattttattatatggaaaataagtggctggatgattaaaaatgaatgaggagtgtattttatgggatatcgaaggttgtttattattagaaaagatttacatttatcacctggtaaattatcggctatgctgatgcattgtgtagaagcgtattatacgtcaaagattagggaaaatgcgactccagtagaaattaaccctaattccattggattttgtataaaaaattctccaaatcacacgacacattataaaactataatatacacaccgaaagaggagtatgatcagtatatcaatggtatattcacaaaaactgtgtgtcaggctagaaataaaagtaatttgttaaaagccacagctattgctgcagaattaggattgtatgaagatattgattatggaattatcagagataaatgtctgactgagcttgaaccagaagaggaagacggtacgactattgtaggtatatggttcagaccattgccagatgatattgctcataagatcagtaaaaaatatcatttatatatgtgattaaaaaaagaactattctatattagaaaagtattgacacaaatattgaaatgtgttatactaaatacagttgaaagagagaacagaattttaatcaaatttctttattaagtcaaagtccaaatctaaaatatcaaattaaaatcccaaaataatttaaagacttatatattttcaaatgtagtatgtatttgtttgtgtctggatacaaatgacattaaacttaatgttcgaatcctaagtttaggagactgcccttacattacgcttataagtgtagatgagaaatgtcaagcggcagaggaaagggtgaatctgtatggtaacataagcagcagttcattagagaacggatcacaagtagcgaatgtgattgaatatttttagctaacaattggttacgaccgatagaacaatcaaacaattaagcggtgggttgggtttgacatcctaaaggtatatatcctccattcctatgtatcaaatatgtacgactgaggatgaagtaactaccgcaaaataatgggctatcgccaagcggaaaaggcacatgactttgactcatgtattcgttggttcgaatccaactagcccagttacgctggtgtgtcggaattggaatacgaattggacttaaaatccaaggctcataagagattgagggttcaaatcccttcaccagcatttaactagataatattaataaaaaggagtacaaacatgatttcaattacatcagatggagctaataagctcataaaaagtttagaagaagaaaaaaatatgttattgcaagatatttcatcattatcaacttttgttgctgctatcacagaagatccggaaagtgtaagaccggaatttgatcttaaaaagacagtagaacagataagtgttatagataataagcttatcaaaattaaaaatgcaagaagcgtatttaatacaaatatgaaattaaaatcaggattatctattagcgaagcattaatcagaatggctatgttgaacagatatttatttgattgtaaaacattagctggaagatatccaaagactagtatagaataaattaaatttatgctatatatttttgagatgatgtatggtaaaatagtgttatcaaagaaaggatgatcgctatgagaaaaacatatcttcctctgtcagatgaagacaggaattaccttaaatcattatcaaaaaagagaaccattcaggcacaagtcgtggatcgtgccaggattcttttatataaagccgatggaatgacattccaggaaattgctgataaacttgcaatcagcactgccacggtacgcctttgtgtttcgaagtttcataaaggcggtgtggatgctgcactgtttgatgttcagcgtcctggacgtccatccgaaatcaccgacgatgcgaaggcatggatgatcagtattgcgtgtcagagaccggcagaactcggttatgcgcaggaactgtggacattggcttctctccataaatacattcagaaacatgcagaggaggcgggatatccaagactttcaacagttacgaaaccttatatccagaaattcctcagggaacaggatatgaaaccctttaaaatcaaatattactgcgaaaagagggatcctgattttgaatcaaaaatgcatgaagtcctgctggtctacaaacagattgaaatgcagtttgatgagaatggtgatctcattgttccagacgattataaattgacgattacggtgtcctatgatgagaaaccgggtattcaggcaatctccaatactgcaccggatttacgcccgacaccggaacacggagaggtatatcgtgatgcagaatacaaacgtcttggaacgctctctttgctggcaggcattgatctgcttacaggagaagccatcccgttagtaagtgagactcacaagagttctgattttattgagtttttaaagatactggacaaaaaatatccatcacaggatacaatccggatcatcctggataatcattccgcgcatacttccaaagaaacacggcgctttctggatacgctgccaaagggacgttttaaatttgtgtttactccgaaacatggctcatggttaaacatgattgaaagttttttcagtaagatgacccggcagatgcttcgtggaatccgtgtcaataccaaagaggaattggaagagcgaatttacaggtattttgatgaagtaaatcgtgaacctgtgatttatcactggaaatataaaatggatgaaatcagtgaagaggaagcggcatccgtttgatatagcaattatttaatattcgttatactagatcagcaggacctaataaaacagaaatagaatatcgctatattaattatgatttgcagtatgcaaaagatttatataagaatgttagtgaggaaattatggaaattcaaaaggaactaaatattattaattcatcagagatatttgatgtagatattgacctttaatttatttgttccatattataatttagtttttttaatatgtttaatgcgcaagtattaaagaaaaagataaaagatgactggctagacatggatattgttttattgttattagttgaagttaataatatttatttctaaatgataaggttgtatagttattgttttctaggtatgaacaacttagatattttaaactcaaatttaaatactaaattataataaaaaacttaatggcatggaagtttggttataaatgccttttacataagcggtatgttgctatcatgctttatattctttccctcctactaatatatatcactcttttaaagcaactaccgcaaaatgcagatatggtggaaatggcagacacggaagattcaaaatcttttgagtttatctcgtatgggttcaagtcccattatctgcagcagccacggctagtctcaatcatttacatatgatttctgtcggagacggcagaggccgtggtgagcacctggaaacttagctcagttggttagagcatccgcctcataagcggacggtcatgggttcgaatcccatagtttccattcaggctacggaaaaatctgaaggccaaggattatagtagcttgaaaggtatacctacttgtgagtgcagccatcctggaagatggaaaatataacatgtaaaaatggaaagaagccatagacaatttaatttcctgtactgaggatgagggacaaaaagggaatgatcaaaggtaggatgatacagcatccgtgtaggtacaagaaatactgcaactattaacacaaatagccgtttcaaacatttaacgaagagtcattcttcaagttcattccgtagagcgaaggtggagcaatctactagaaagccttgcgaaaaacttattgtatagagagaaacaaatacggtgaggagtagtaagtccgtatatatacaatgttcttggaagtcaaaaaagtgagtcccacagggaacaagcggtttataagagaacaaatatagtataaatcatgacggaagtggaagacgtagaaaagccaacggtaataaactaaacgtgctgccatcttatagacgtataagattattaccctatcgtagctgcggcgtgaatggttcgatcccattctgatttataatatatttagcatgtattaccccagatgatgtatagatgtatacatcggcaacactatcagttgtgtaagggtgatcgttcaggtggcgtgagctgagtttaaattcgtcagtaagtaaacgtgatgaaaggttttgcctgaatattaattttaaaaccagatagaatcttggttgccgtggcgtaccacgtttgaggattttaaaagattatataaagttggccagtagctcagtcttgggagagcacacagttttctgttaggtcggtggttcaagtccactctggtcaaattgtgataatatagcgcttaattattgcttagaaaataaagaaatgtatgggagattttatgagtacaaatttttatttggatttattaagaacaggagacgttgtagtttccactaaaggcagtaaaggtattgttttaaaggatactgcgaataaaggacatgtaatcatttggtttgcaaatcaagatgattgtgaaattaataagtttagatcttttgatatgataaactatgatatgactttcaagtatgataaaaaagacaatcgtattataaaagtttacagaccaagaggtattcatgatattctaaatgctttattggattatactcatgaagatgaaatgtctggatatgaattagtttacgaggaaaagttaaaagaagttactatggacgaagtagaagagaagttcggatgtaaagtgaaaattgtaaatgattaatgtttaatttgtaatgaatcacagaggtaataaatagtgagtcacggatttgtatccgtgcgaagctgtcagtgtgacaaacgctctgccggaaaggcggtagagtgatgcaacagaagaaatttatggatattcaacgtttaaaagatcagtttgttgatggctttagacctggagacatgatagtggtacaagaaaaaattgatggatctaatgctgccacacgttacgatgcagagactggaacaatggttacattttcaagaaagaaaacgttggatcaatataatacattaaacggtttctataattatattcagacattaaatgtagatgactataaagaatttccacagtatgtgatttttggagaatggaccggagcgagaaatgcaatcatctacaataaagagtctacaaataaatggtatgtgtttgatatttatgatgtagaaaaagagcagtatcttccacaggagtatgtaaaagagtttgctgaggaacatgatctgatatatgtaaatacttattatgttggaccgtttataagttgggaacacacaatgagttttatgggtacttcagcatatggagatacacaggaaggaattgtggttaaaaaccaaacaagattaaatgatcaaagtgagagactaccattcgtagttaaaatcgtcggagaaaaatttcaagaaatcaaaaagtcaaatcatattcgaaaaatcgaagatccccaaaagttacaagagagacagaatgcaatgactctaaccgaaagtattgtaacaatgcgtagagtagaaaaagagttatataaaatgcgagatgaaggcattttaccattagattggtcagagtcagatatgactaaagttgcgagagaattaccatcgagagtatatgcggattgcgtaaaagaggagcctgagattgttaatgaggttggtaaatattttggtaagttctgttctgcaactgcaatgaaatacgcacgtaatattattttaggaactccggtctaatttagcgaaaggaggatctaaattgagtgttagaggaaagaaaaagtaatattttaaagtgttctggttgtcataacactatggaatattccgaagatgaaacatggatagatgataaagggtctggttattctacaaagcttatccgatgcggatgctgtcagaaaatcaatgttatcaaatattttatagatgaaaatatgaatttaaataatgacaaaagattttatgattataggagaaaataatggcaaaaaaagagaaaaagattttagataaacagggatgggtccagagttttatgctaattggacatcctgtaattagtgagtatacatacaaaattaaccagcaggcaaagtcaagcgattggatttacaacactttgagtctcaatgtagattgtggtgaggaatttggcgtaattcagtgcgaaatgaatggtggatacggcgctggacgtgaaaatgtatgttatgttcatggaaaaaaagaagatggaaaagatgattttgaaaacagataccagattgattgggatgatcgtatggatgaagacatcttaaaagatgttggagatttatgctttatcaaaattggactcgaaaaagatacaaaaggaaatgttgttgaaagcagatttttaaatgcttacgatgcaattaatcatattgcagaaatgcttacagaagatatgcttatcagagttcatgggcagcttgaatatcatgaatatcagggagttgttcagcttagaaagaagattaataaaattgttcttgaaaatgatacagcgcagcctacagctcagtttacccagacaatgttaattgacaagtattctgttggaaaacctgacaaggaaaaacagacaattccgattatcggatatattcttgaaaagtgtaaagagtatagaggtattgatttaacagatgatcagaatcgtggtggaaaatatgttcctcttcgcagggagttcgaatatgaatatgacacagaggatatagaaagaacaaagaaaaaaatcaatgttctgtttaaggtaaaaaaaggatacacaatgattacatataaaggtgtattcgtagaaggtggagcgcttattactacaacatatgcagatcttgcagacgatgtaaaagagcttgttgattgtggagctatggagctagaagaagcgcttgcggattgtacagagaataaaagcaaagttcgtagaatgatccttaagaaacctgttattaaaatggttggggaagaaggttctaaagtttctcagatacagaaatttgaaaataagtattctgaagaggatcttattttggattatctgattcagccggaagagaaaaatgacgaggatgatgaggttccatttaatgaggtagattcaaacgatatggatgatgattcatggcttgatcagcttggagagtagataagagtaattgaggttgataatatgggcagcagtctgtgtgactaactgcccagagataaaagatagaaaatagaacaaagaaaatttaatgaagatatggagatatataaatgggatacggtaagaaaaatgttattaaaattaatccactcgaatataaccttggcttaatcggagaatctggggttggaaaaacaacgatcataaaagaggtatgtgaaagattagcaggagaagatggatatatgttcctagagtgcggtaaagaagatggtgctgatggaatcaatggaattaattacttaaattgtccagaatggtctatggattatgatgaagatacaaactcaatcggtttcgaggattttgtagatgatgttattgaaaataaaactacagaatatccacttttgaagacggttgtaattgatacatatgatcagcttattgagattgcaaaaccggaagttatcagaatgcataattctgagaatccagataaaccagtaaaatcaattaaagctgcttttggtggatacatggccggagaggacaaagctacagaaattgttcttgataagctttgggatttgaaacgtgtaggtgtgcattttatcattattggacatgttaaacagagagttcaggaagatgtggcaacggggcagagctacacatcacttacaacaaacatgtctatgcgtgatttcaatgcaattaaaactaaactccattttcttggagtagcatctattgatagagaaattgttcaggaaaagactggaaagaaagatagtaataagaaagaaattatgaagggtgtaattacaaaagaaagcagaaaaattacatttcgtgatgattcatattcgattgattctaaatctcggtttgcagatatcgttcctgaaattgagtttaacgcagatgcgttgattaatgctttaacagatgcgatcaaagcagaagcgtctaaaggtagtaagtcggtagaggaattaaagaaagaacaggcagaagcagagaaagagcgtgaaaagaaaattgcagcagcagaagaagcaaataaaaagaagaaagagcttgatggaattaacgataaaatcaaagagttttgtgttgcaaataagagcactccggcagcattaaaaccgcttatggaagtagccaagaagcatggatacaagaatccggcacagattgatgatatcgaaattgcaaaagaaatccttgcgttgactgcttaagattatttatgtgtagtcccagggcttatagtcctgggatgttttgtatagtagattggaggtaacgttttggaaaagaaacagcaggacaaagaaaattttgacagaaaagacgctgattttcgtaaaatgtgtgcatggattgaaaaagaattatttggatataacgaggatcaaaaacttcaaactatggcatgtcttaagcttcaaggattaagaaaaggaaaagctgtggcaaataataatatggaggataatggtaattattctgttgaagttgtttttaatacattcaaagtgaataagcaaaaaatattaagagccttaaaaggtaagaaattcaattcagaagcaaataaaatggggtatatatgtgctattgtcagaaataatatcaatgatgtgtacacacgtatgaagaatgctaaaatcaatcaagagaaacgtgagagtgctgctttaaataagcatccaaaaaataatacagatcctgtggaatataaaagacagacagaagatattccaaatagtgacaaattcgaggaaatctggtaaatggctcgtccagtaaaaaatagttcagcaattaaaatcgctgacaaaaagacagccacaccatttgaaaaggaatgtattgaaacattaaaaaaaatcaatgaatataaattaatcgcagaggcaaacgcagtatcatccatatataaagagccagatcttatcagagacacttctttaaaactagaagatattaataataatgcatggagagtttattttaccatagcaaatgatcttattaacgtagagcaaaagaacactcttgatgaaatcactattaatatgtatctttccaaacattctaagttaaattccaaatatgaggaatatggtggctttgaaaaaataagcagtgctacatcgtatattaaaatagagaattttgattcatatgtaagtgaaataaaaaaatggaatgcggttatgcgtcttgtaaagagaggttttccagtaaaggatcgcctgagtgaatatgtagatgcaaaagccgaagatatttacaatgagttagaagcttggcttaatcatacgtttgtaaatgtagaatctaatatcaagacatttaatgcatgtgatggaatccatgatttgattgatgaactgaatgccgggagccaggtcggaatgccattatcggatgctcatatccttaacagagagattggtggaattaattttaatgggaatatttatggacttggagcaaattcaggagtcggaaaatcgacaacagctattaattatcttatgccatctgtgttagcaaataatgaaaaaatggttattatgatcaatgaggaagaccagaaaaaagtaaggaaagagcttttagtgtgggttgctaataatgtatataagggcaatatccataagtatacattaagagatggacattttgatgaaaaaacgatgaacgttcttagacaggcagcaaatcatttggaggaattaaaagatagaaggaatattactattgttccatttgaaaaatatactgtaaaagctgcaataaaaatcataaagaagtattcaagtatgggtgtacgtttgtttgtattggatacattaaaagaatcatcagattccagaaatacagaaacgtggaaatctatggagcgcgatatggtggatctttatgatgtcgtaaaaccggcagcaaagaatgttgcattatttgttacatatcagttaggaaaagcatctgtaaagatgagatatcttactaataacgaaattggccaagcaaaaaacattcttgatgtattcagtgtaaatctaatgatgaggcagccctttgatgatgaatatgagggtggatctcacgaaatcacagcatataaattgacttctaaaaagaatacaaaaatcccattcaaattgaaacgagataaattttatatgattacatttattacaaaaaatagatttggtatgactgatcaatatcaaattctatccgaatatgatctgagtacgaacgtacatcaggatgttggaatatgcaacatcatacaagatttttaaatacattgagattgtaggtttcttataaaatgactgcattggaaataaaaaaatatatttatgagaatgataaaattcaagaaattttggaatctattgggtgtaaaaatatcatttatcacgaaaataaagagtattatagctgctctaatgcggttggaggagactgtaataatcctgcggctattaatattcgaaataatagctatttaaactatagaaatttcacaagacatatttcttatgatgatggggaagatctgatttctttggttgaatacaatatggatatagattttatgggggcattaaaattcctgcataaattattgaatataaaatttacattagcagcacctcagaagaatatgaagccacttgatgattcgtggtttgtattttctaagtattctaaaagacggaaatgcattgtaaatgatttcaagccaatggacgaagatattttatcagattttgttccttatatacatattgatttattcagagaggggatcgtaaaaagcacaataaaaaaatttgagcttggttattcatataggtggaaaagaactatatttcctgttaggtactggcttgatggaacattaatgggatataacgcaagaagctcagttgaaacttgtgaagaacttggcattccaaaatattttattactccaggaatgaggaaagaaatcaatttatatggtctttggcaaaattataaaaatatacaaaatgcaggatatattgttgtgtttgaagctgagaaatcagtattaaaaagggatagccgtatggatcctacaggagtggcgctacaaggccatgctatgtcagatgagcaagttcgaatcatactcggcacgggagtaaaagaaatagtaatagctatggacaaagatgtacccatagaagaagtatggagtatgtgtgagaaattttatggaataagaaaagtaagttacatatatgatgaacataatattcttggtccgaaagactctccggcagatgcaaagaatccagtttataaaattttattcaaatatagaaaagtatatgatgcgaaacgtcataaagaatatttaaggagattaaaaagtaagtattgagagtaaattctgaaaaaattaaaaagatgtgcgaggcacttggaacagatagattaaattcttggagcagagttaattgtattcataatagtttgtatgaatattatttgaaatatattttgcataaagaagaggatcgagacgattctatttataaagtaacaggtgggatcagtcatgatatcttagagaaatattatactgcacaaatcccatatgacgctatggttgaagagtttgaagatgggtggacaactgcgtttgatattgcagaactcaaattcgtaagaggagacggagatagaaataaaagtattgccaataaatattattatgatttaaagaatttcttttctacacatgagcgtattaaagatagaatcgacattgaacagtttattactgtaaaaattggtgaagagtattatcagggttatatagatgcaaaagttacagatgctgatgggaacattactatcctagactggaaaaccagttctatttataaaggagacaaggcaaaaaatgaatgtggacagcttgttatgtatgctatggcattacatcagcagggaattccatatgaaaaaatcagaatcgcgtggaactttttaaagtatcagtgcgtaactgtgcagtctaagaagggagtaaaaaaggttcgtgagattgagagatgcgaattaggtgagaaactgcaggctaatgcgaaaatgtggcttaaagatgctggttattcagaagagcaggtattcgaatatcttgatcaactggctcaaacaaatgatattactgttttaccggaagcggttcagaacaaatacgaattccatgattgttatgtatatgtggatcttacagaagagttaattaatcattgggagtcttttattattgacactatgaagttgattcgtgaaaaagagaaaaagtatttggatctgaaagaaaacggaaagtttgaagaagcagataagctttggtgggaagatgaagaaagtttaaagaaacagagctattaccttacaaatctttgtggttactctgcaaatttacataaacctttaaaagcgtatcttgaaaaacttgattcaaataaaaatggtgatattttaggtcagaaaaaagaagatgagtatgacgtagatgatttgagttggctgaatgatttataaaaagtaagaagggttattatgagtgataaaaattatgtagtttatcatcttcattctgatctgtctaatggcgtaaccaatatagacagtgttacaaaatattttgaatatattgactacgccaaaagtttaaatatgatggcgatgggctttagtgaacatggatcggtattggaatgggtgcataaaaagaacaagatagaagcagcaggtatgaaatacatccatgcggaagaattttatattacagaggaattatataaatatcctgatataccagatgaagtatatgaatccatgctagggatggatgaggccgaagcacaaagtgaaatagaggagcatttagaaaatggcaaatatcaggtacgagacaattatcattgtgttctaatagctaaaaattatgatggagtagaagagttaaatgaactatcttctaaagcctttttaagagatggacatttttattataatcccagaattacaatagatgaattaataaatacatctgataatattattatcactactgcatgtttaggcggaatattggcaagtgaaaataaaccgatgcaggaaaaaatgttaaaattctgcattaaaaacaaacacagatgttatttggaaattcaacatcataatgatgataagcaaaaacaatataatatatatcttgaaaaaatatcaaaaaaatataacattccattaattgcaggaacagatacgcattgtctaaataataaacattatcttggcagacaaattatgcaaaaatcaaaggatgtaaaatttgctggagaagataactgggatttattatttaagacttacgatgatttagtagatgcatataaaaaacagggtgttttaagcgaatctatatacttagaagccatagacaatacaaataaaatggctgcacaaattgaaccatttaaattggactattcaaaaaaatatccgaaactatatgatgattcacttggtacattaaaatctaaaattatagatggtatcaaacgtagaggagttaataaatacgaaaactatcaggaatataaagatagaattcaatatgaattaaaaacatatatccataatcaagcaatagattttattcttcttgaagaggactataaaacagcattaagaaatcaaggggttgaatttggatattccagaggatctgtatctggaagcgagatagcttatttattaggtataactgaagtagacagtattaagttcaatttgaattttgagaggtttatgaataccgaaagaattagtttggccgatgtagatacggattggtataaagatgatagatggaaagtaagacaatatcttttccaaaaagaaggattacactgctgtaatatcattacatttaatactatcaaacttagaggtgctatcaaggatgttggtcgtgctctaggtatgacaccagaacaaactcaagcaatatctaatatggtgcaagaggatgagaagaaaaaagaatttataccagataaagtaagagaacaatatccggaattatttgaatatgtagatattgttgtaggaaccataacctctttaggtagacatgcagctggattggttgttgctccacatgaaatagataaaaagtttggcacattatatatttcatcagatgataaaccaatatcacaaattaatatgaaagagatagattcgctgaattatgtaaagctagacgttttaggacttgactgtgtgggcctgatatataaaacctgtaagtctgtagggatagactttcttacgccagataatatggattttgatgacattgaagtatggaaagatattgccaatgatactactttaatatttcagtttgagtctgattttgcaggaaattatttaaaagatattttaagagaaagtacaatcaaaaatattaaatcaaaaaatccaaatttctcttatatagatttgatgtcaatggcaaatggagctattcggcctgcaggagaatcatataggaatgagttatcacaaggtatatacagagataatggtcatcctgcattaaatgaatttctagcacctacacttgggtatttagtatatcaagaacagatcattcagtttttacatcaattttgtggatttacaatgggtgaagcagatgtcgtcagaagacatttttcaaaaaagactggtacagaaaatgatatacctgtgattaaaaatggagggtatttgttggatgataaaggagaaaaaaccagcgatcatcatatcccaggatttatcaatacaatgaaagaaaaatataatgtagaaaaagaagaagctgagaatttaattgtaaatttcttacaagttataattgatgcaagtgcttatttgttttctcagaaccatgctgacccatatagctttttggggtttgcgtgtggatatttgaggcattattatcctctggaaacattaacagaagcattgaatgtatatgcagaggatgcggataaatcatataaaataaaagactatatagcaagcaaaggtattaatataaagcaaattagatttggatattcaaatgctgaatatacatgtgataaagaaacatacgaaatatatcaaggaataggtagtattaaatactgcaacaatcaaattgcagaagaattaatggagttatcaaagaataaatataagaatttcatagagttgttaagagatatccatgatcatacctctgtcaattcaaagcagttggagattctaatcggattagatttcttttccgattttgggaagaataaatatttgtttgaattatcaaatctttataataaattcgctacatgtaaacagattaagaaagacaaaatggaatctctcggacttacggaatatcttatgaaaaagtatgccggaaaagaaacagcaaaaatatataaagaaatagataatattggattaattactgagttatctttacgaattgaaaatcaatcaatgtctgtagttgatcaagtcaaatttgaaaaagaatatctacaatatatcgtatttaaaaatccaaaagtaaacaaaacattttatattgtaaccgaatataagacatacaaagaggctagaaaaccgtatttagtattacataatattaaaactggagaagacgtaaaagcaagagttaccagtgttaaaatctatcaagataatccattcggagaatattctatattgaaaattgatcgttttaccaagaaaaataaaaagaaatgtgtaaatggaacatggactgaaactgatgaactggaaaatatattagatgattatgaggtaataaaaaaataatgaaacaggaaaataagaagttcaattgtataattgaaagatgtacatatgattctccggattataaggtttattcagcatacgttgataaaaaacagtatccagagattaagcataatgaaaagtacggaaatgtaacgatatttggaaatctacatcatctttgtgaaacacagtcgtatgaagttacagctgtggaagaactgaataaatatgggtatggatataaagttattaatatcagaatggatcagcctaaaagtgaagaagatgtttatgtgtttcttcaggaaattttaacattcaaccaggcatctgaattatggaaacactatccagatattatcgaccgtgttattacaggaaatactgatgacattgatttgaataaattaaaaggtataaaagaagctacattcttaaaaataaaagataagattattcaaaattatgctttatatgatcttgtagtggaatttggtggtattttgactatatctatgttaaaaaaaatatatgacgaatatccatctattgaaatgcttaagaggaaattgagagaagatccgtataaatgtttgacaagaatatcaggtgttggttttattaaagcagatgctattttacttgagctggagcgcacaaataaaatcaagtttccatttgatttaaaaagtagccaacagaggtgtgctgcatgtattgaatatttccttattgaaaatcagaataatggaaataccaaaatggacctgcgtgatcttagaaaacaggttgtaaaattagtccctacttgttctcagcattatgtagaatgtttaaaaaacgattatttttattataataaggaaacatatgatattgcattaagaaaaacgtatgatactgagaattacattgcagaacgtattgcagatgccaatacatataaaagagtatggaatattgactatactaagtataggaatgtaggtgactgttctttgtctgatgagcaggttagcgcactgaaatgtatatgcgagaataacataatgattctcaatggaaatgccgggtcggggaaatcaatgacatcttctgcgattattaaaatgctcgatgataatcataaaacatttaggctatttgctcccacaggacgagcggcaaaggtattaagtgattatacgcagtgtccggcctcaacgattcacagaggattagggtataggcctcctagtgattggggatacaataaagaatgtaagcttgattgtgatgtattaattattgacgagttttcaatgactgatattttcttatttgcccatgtgattgatgcacttgattttaaaaagacaaaactgattataataggtgattcagcgcagctccctagtgttggccctggaaatcttctgcatgattttatgaattcgaatataataccaacaatatcattaagtaagatatttagatatgctgatggcggactaatgaaggttgctacagatgttcggaatatgaaaccatatttaaatggaatcaaagagaaatgtactgtatttgggaatgcaaaagattattcatttatacaatcagcaaatgaaaggattgtgaatgatactgtgtcactatacagaaaattgattaaaaatcataaacctgaagatattttagtgttatctgcgtataacaaaggtgagtatggcacaatagtgttaaataagcatttacagaaacttgctaatccaaatatcagcaaatcgtcaataagtatgcaaattggagaaacaacattttacaaggatgacattgtaattcagacggtaaataactataaagctattgtatatattgacaatcaatttacttatggagatgacgcagaaacaacttttattccaaatggaatgataggaaaaattaaactcatttcattgcagtttgctgtgattgattatgatggtatcgaagtaatttataaaaaaagtgatatgcagagcgtaatgctcggatatgcaatttccattcataaatcccagggcggatctgcagatactgtagtattactgactccttcaagtcatagttatatgttaaactcaaatttgatttatgttggattaactcgtatgaaaaagaatctttatcatttaggtgacagcaatgcgataaatagatctgtgaagaagaaagaaaatcttgctcgtaacacattcatgtgtcattttttgaaaaagaactattcattattagaaaacacttgacaaatataaagaagggatatataatacattcataacaaaaatatgttataaaaacacggaggtaatatgaaagtatatttaactgagatgcattcgattcgtgatgcaatcaggaccatgtatttaagtaagcgaacatggaatcctgaattagaaaagcatttaaagaagcttacagaaaaatgcacggaacacagcggtaaaccaatcgtaaatgattcaagtcctgattatacagagttcagtgaagaagtaagaaaacttctaaaatggggcaagaaacacattacaatgctgagattcctggatatgtctgttgtagtagaaggactccacagaggagctacggacgatcttgactctcatgcaaaacgaatggataatcgaataatcagatcaagtacaagactcgcaaattacaaatctaacgaaatttcagaatattatcaatctaaaataatcccaacagatatcgcattagcttatttaaatattgaaacgccagaagaaattacatatgacggaaaagagtatgtaaaagctgaaaacggatatattcttaaaggtatggaaaataacaaagatgttaaacgtggtctttatatgctgtctttgcctatgaattttacattcaaagtaaatattactgaatttgcacatatttatatggagcgtggttctaagaaatatggtgtagcacatggaacagcagctccagagttacaggatatgattgaatcattgatggaacagatcacagagtggtatcccggcatcacacgagagtatttagcagaagtggagaataacaatgtctgatacgatttattattgtacgaaagagaataatacatgtgttatgaaaaatcaatgtaaaagatatctgcgatcaaatgataaaagtgctgctaccttatttaaggtagcctgcacaaaacaaaataatcatattctttttattcaagacagcacagaaggagtacaaaatgccaaagaaaccgattaaatttttatttgttggacgtacagcgactggtaaatcatcaattgcagaagcggtcagtaataaaatgggattacgtgtagtaaaaagctatacaactagaccacctagagaatcagaactatttggaagatcagatcattattttgtatctgatgaagagttcgatgagattggtagtgtatatggattttctgcagaaacaattattaacggatataggtatgccactacatttgaggaaatcaataattcagatatttacgttattgatccgaatggaatagatgctttatttaattcatgcaggacatggttcgattttgtggttatctacttcagaattccatacacgatggcagaaaaaagatacattgaacgtggtggaacaaaacaaaaatttaaggaacgatacgctaaagagagtgaacagtttgaggcctttgaaaaacagcaaagattttcttatcatctactaaatgatagaccatttgatgaatcggttcacatggtgtgtcagtggattaaaaatgaattagaacactaatttttgctttaaacttgtatatattagaaacataatgtaaaaggtgacaagatgtttttgattggatttattttaggaatagtaacaggaataattcttcttagcctatgtgtagctaatgggaaaaatagtaataaataaatttgatgataaaggagttataagtgatgtatgaaagtaattaaaaaggatggcacactagaagaatataatgaacaaaaaattattgatgcttgcaataaagcggcgagaagagcaatggtcgaattgagtggagaagactatgcgaaaattttaaacgatgtatgggagagtatacaagaaaattacgaagaagatacagacattgaaatttatgatatgcataatattgttgaagcagtattagaaaaagattatccacttgttgcaaaaatgtataaggaatatagaaattataaaaaagatttcgtacatatgatggataaagtttacgagcggagtcaggcaatccgttatatcggagataagagcaacgctaatacggacagtgctcttgttgcaacaaagagaagtctgatttataacgaactcagcagtgagatgtataagaagttttttatgacatatgcagaaaaacaagctatgaaagatggatacatttatatccatgacagaagtgctagacttgatacatttaattgttgccttgcaaaagtcggagacattatgaaaggcggttttgagatgggtaatgtttggtataatgagccgaattcgctggataccgcatttgatgttatgggcgatattattctcagcactgctgcacaacaatatggaggatttactgtacctgaagttgataaaattttagcaccctatgcacagaagagctatgacaagtatgtgcaggaattttatacagtagaagatatgatcgagaataccgaaggaacatatttagactgtttatctaatgtaacatttgaatcacaagcagccgaatatgctacagaaaaagtacgcagggactttgaccaaggatggcagggtattgaatataagctgaatacagtaggatcctccagaggagattatccttttgtaactatgagtattgggttagctactgacaaatttggaaaaatggctgcaatcagtctattaaatgttcatgcagagggacaaggtaaaaaaggatttaaaagacctgtattatttccaaagattgtattcctttatgacgaaaatattcacggtgatggaagtgaacaatatattaatgcggatgtatttaatgcaggtattgattgtagcagcaagaccatgtatccagattggcttagtctgacaggagaaggatatgtccctgatatgtataagaaatatggaactgtggtatcacctatgggttgtcgcgcatttttaagtccatggtacgaaagaggcggaatgtatccggcggacgatacagacaaagcaatttttgaagggcgttttaatcttggagttgtatccttgcatcttccaatgattttgtctaaagcaagaaaagaatcaaaagatttttatgaagttctggattattacttggaactaattagaggattacataaacgtacttatgattatattggagaattgagagcaagtgtaaatccagtaatgttttgtgaaggtggacttttgaatggatatctaaaatcagatgaaaaaattaaaaaacttcttccgccaatgacattgagttacggaattacagctttaaatgagttgcagcgtctgtataatggtaaatctattagagaagacggtcagtttgcattagacgtaatgaaatatattaacgaatacgtgaccaggatcaaagaagaagacggtttattatatgctatttacggaactccagcagaaagtctctgcggacttcaggtagagcagttccgtaagatgtatggcattattgaaaacgtgtcagacagagaatatgtaagtaatagttttcactgccatgtaaccgaaaacatgtcccctattgaaaagcaagataaagaatatagattctggtcttattttaacggtggcaaaatccagtattgtagatataatcttggctacaacaaagaagccatcaaaactcttgtacttagagcaatgaaaatgggattttatgaaggtgtaaaccttgcaatgtgttactgtgaagattgtggctatcagcaagtagaaatggaggtatgtcctaaatgtggaagtaaaatgattacaaagattgacagaatgaatggctatctcggattcaccagagttcatggtgaaagtcgatataacgaagcaaagcagacagaaatttctgaaaggaaatcaatgtgattaattgggagtgacatagatgaattatcataatattacatatccagatcaaaacaacggagatggtttaagagttgtactttggttatcaggatgcagccaccattgtcataattgtcaaaatcctcaaacatgggatcccgaaagtggaattttgtttaatgacgatgcaaaaaaagaaatctttgagcaattagaaaaagattatatatctggtattacatttagtggtggagatccattgtataagaataatttaaatgatttatatgaattaatcattgatattaaatcaaaatttcctgaaaaaacaatatggttatataccggatatacctgggaatcaatattctttttaagtatggaacatggagacattatgagagtaatgattgtattgctatgtgacgttattgttgacggtgaatatgttgatcatttaagagatgtaagtttacattggcgtggaagttctaatcaaagagtaattgatgtaaaagaaagcttattaaaatttgatcgtaaaaatattcattcagaaattgctctttgggagtaaatttatggaatcagtagtaaatgtaaaagataaactatactttgcaagaatacttcctaaagtgggtatttatgatgtatgcgaattaacggtgcgaacagtaggagaggattattttgttggaatagacaaaagagataaacaggcacatatatttggatatgatcgcgtaggaaatgatgtattttctagtcgaaatgtcgctttagagaaagtacagactgcagagaagaataaaactaaaactcctcaagaagtattctacgaggaattttaacaaaaataataaagaataaaaggagaattttaaaatggcaattacaatgaaaagtacaaaacaggaaattatggatgcttacaatgaggcaaagaaaagattggacgaagtagagagcgtaaaagatgatccagtggctgcagctcgtgcggcagaagaagttgcaatcattgaatctgctgatagcgttgctgcagaaaatatctttaatcctgagattattaagaaatatacagatttacaggaagcgaccactattaagaaaaaagagcttaaggatctgtatggtattgaagccaaagctaattctatggttgcaatgattaatgcttataaggataaagagattgatatcaaagaggaattcagactcaagaaagaagaactcgaacgtgatctggctaatacaaaggaacttcttgagactgagatcgaacagttaaaggtagttcgtaagaaggctattgatgatatcgcggatgcagaagcagaaaaacgtgcagatgttcttatggatagagagcgcgaagaagaagcgtatacatacaatcgtgatcgtaagagacgcattgaagaagatgagtggaatgacaaaatggctaaagcacaggcagagttagacgctaaaattgctgatgtcaatgagaagcaggcagaacttgcagagaaagctgaatatatttcagatcttgaagagaagattgataacattcctgtaatgcttgagaatgctaaggctgaaggtgtcaaacagggaaaagcggatgcggataaatctaatgcttttgaggttagagcacttaagaaagagaatgaatatcaagtaggacttctccaggataaatgcgatcgtcttgcggatgatcttgcttccgtaaaagcggagaaagttgaacttcagaacaagcttgacgcagcatatgagcagatgagggatctggctgcaagaactgtagaatctacaggtggagttaagattttgaacaatgctacaggaacgcaggctaataaataatcaaacttgattggatgtgcaatgggaaggacaaaaatccttcccagcctccaaaaaaattatataaggagttgaaaaattaaaatggtagtagatgtaaacgaacagatcgaaacattgattggatatttaaaagaatctgataatattgtgttttttggaggagcaggtgtatctacggaaagtggaatcccagattttagaagcaaagatggattatacaacaaaaaagatattaaattcgatgcatacgatccagagtatcttctgagtcatgggtgtttattcaattatcctaaaattttctttgaattctacaagcagaaaatggacactcgaaatattgagccaaatatcacacataaggttcttgccaaattagaggaaataggaaagctgaaagctattgtaacacagaatattgacggacttcaccagaaagcaggaaataaaaatgtatatgagatccatggatcggcgcttcgtacctattgtacaaactgcaagaagaaatatgatgaaaattttatttttgataatgatgaaaaaattccaacatgcccaagatgtggaggattggtaagaccagacattattttatatgaagaaacacttcctcttaaagctgttaataatagcgttcaggccatttctaatgcagacatgcttattatcggtggaacatctcttaccgtttatccggcagcatcatatatcaatgagtttcatggaaaacacttaattattgttaataaggaaaaaattacattaaataatacgtttttagggctgaatgatatgatgattgaatcctctttaggtgatgtgtttcgtgtaatcaatgatcgtcttaatgagattttaggagaataaattatggactttaaatgcagcaagtgtggcagtagtaactatacgacagaaaaacatggtaataatatagggctatattgttctggttgcggaaaatggcataaatggctgagtaaggatgaagtaagaatctattccggaaaaaacagacaagagaacttagaagaaaacacagatgattttaagcgtgtaatcaatcagcttaaagatttcacagactatcttgataagattattgatcgagaattaatgaaagaaccgctatctgaaggagacagtattcggaaatgtgcttactgtactgcgctggaacgtgataaaaatgctttattgaatattatcgatggcaaagactggagaagtagagaatgatttatgtaacaggtgatacgcatggtgattggaaatcacggttaaataaagacgcatttcctgagcagagagaaatgacaaaagatgattatgtaattgttcttggtgattttggtatttgggacaattccgatcgagaaaaaagaaatttagactggcttaataatagaaagtttacaactctttttatatcagggaatcattctaattatgacatcttaaatggtcttcctattgaaatttggaacggaggaaaggtaaatttcattcggtctaatgtaatccatcttcggagaggacaagtatttgatattgatggaataacattttttgcatttggaggagcttctagtcatgatatttcagatggtatccttgaaattggtgatcccagaataaaaacttggaaaaaggatccggataaaatgttccgtatcaaccataaatcatggtggaaagaagaattgccatcaaaagaagagatgcaggaaggtgttaataaccttgtaaatcataacaatgaagtagatttcattttgacgcattgtgcttcgagtagcacagcagctttattgtctgcaggactatacaaaacagatatattaacgtcatattttgagcaaatcaggatgttagtggattataagaaatggttgtttggacattatcatgataataaagcagtaaatgatagtgaaattttattgtatgatcaaattataagaatagcatgaggaggaacaatgggcgaagcacttttagacttattgagtttcatatgtctgatcatgattttgatattagttgtgtttatcatactcaaattaattgattatgaagtgtatgtatcaagtaatttatcagaagcgaataaaaaacgatacgaatatgactttgcatcaataaaagaatatgaaaagattgtgagcagtttagatattcagctatatactttttatattgaaggaaactgtgtaattgataaatcacatcttatttttgacggaaaaatgatgattttgtatccagtatcatattttatgtttattagaagatttaaaaataaaagcaggaagagaaagagaataaaaggattatggaaaagttacttgaaataggattttgtatgttagttatagtggtagctatatggtttagtcagtcacattaaaagtataaaggtatgcggcatgggattcgtaaaaaatagaattaaaaaatatatcaacaatattatcagtgaagtgatggatgaaaagtataataatggggatttctgtcagcatgattgggaactgatttttgatttgaccgttaatagtcaaaaggcaattaatccagttaattatataaaaatatatcgttgtaaaaagtgcggattggagaaaagatatgaagcagaaaaacaatgaattaattaatgatatttctaaatatataaagaagaaaaaatcaagtgtttctaattcaagaagcaaatcaaaaacataaatatatatgttttgatttcatcaagatgggaagaggtataaaaatatgaattattatatagcagatttgcattttggtcatgagaattgtctgtcatttgataacagaccattcaaaactatacaggatcatgattcatttcttatcaagcaatggaatgaaaaagtgaatatagatgatgatgtatatattataggagatgttagctggcataatgcaaccaaaacgattgagatttttaatagtctaaatggaaataaacatcttatcattggaaatcacgataaaaaatttttaagaaataaagattttagagatcaatttgtagaagtggctgattacaaagaaataacattagatgatagagggaaatgtagaattgtattgtgtcattatccgattccttgttttaatcatcattactatggatggtatcacttatatggacatgtacataatagtttcgagtggaatatgatgaaacggaacagatatctgatggaagaattatatgatgttccatgtaaaatgtacaatgttggagcaatgttgggatatatgaattatactccaaaaactttagaggaaattgttgaaagcagcgtaggtcaaaacggtgcaagaatcattttgacttaaagtattgaatggatggagaaaatataatatgaaaccaggattaggaagaaaagtttattgtatttacgatgaagggattttagttgatactgttaaattcataggccaggatagttttattattaatagttttggagaagaaacagaaccggatagttgggaatggagctatgacgcatataatgaaaaatggtttacgaatttatcagaagcaaagaagaaactgatcaatatattaaaagataaatacgaagaaaaatttcagatagtacaaaaaacggatgcttggtatatggttgaattttgtgaataagaggaatggaggataaagaatatgagtgtatttagcgtaccagtaacaattggcgtagatgaggaaaggatcgcggaagagattggcggtaatgtagagcggcaggtagtaaaaacgattaccgaagaagtaagaaagaaaatgttttcgcataattattatcaagacgatccactcgatgcgatgattaaaaatgaggttggtaaaatcgtggatagtcataaagatcaaattattgaaaatgcatccaaaatgttgtgtgaaaagttatctcgtactaaagcagcaaaagaagctgttcagaatgtaatagataaaatttagatattataggtgattttatgaaggtacgagacagaggttattatagggagcaaagaattagaaacattaataaaagaaagaataaaataaaacataatactccgccatggtggagatggaaacctgttgaggatgatgattttgtccctggaaaaattcataaaggtcactatggatatctaggtaggggaggaacaaatgtaaaaactaacacaagaaaaggacatgcgtcatacaggcataaaggagcatatggtaaaactgataattataaaagacatgattaccagcaggttgagcgtatgaaaattgaagagaatgaatataaaaaaggagaattaatataatgaaaaaagtattaattgtagtagacatgcagaatgattttataacaggctcattaggaacaaaagaagctcaagaaattgttccaaacattaaacgtaaaattgatgaatatcttaaacgtggcgatgaagtattttttacatatgacactcattatggaaattatttagatacattagagggtcaaatgttgccggttaaacattgtatttataagacagaaggatgggaaatcgtcccagaattacgaaaaatagatttactacactgtgatcaggttgaaaatatcaacaaaaatacatttggatatacaaactggtatgaacagttgccttataaagatacgagtcttgagattgaattgtgtggagtatgtacagatatttgcgtaattagtaatgctcttattttaagggcaatttacccgaatgcgacaatttttgttgatgcatatcactgtgcagggactacgccggaaaaacatgaggctgcattggaagtgatgaaaagttgtcaaattgaagtgattgaataaggagtattaatatgatttcaattaatggaagagaagttaaaatagaacattttcctgatggaacacagagattaaatataaaagaaattatagatgatgcatggtcgatgaattataaatatcatatagcatggcgatatgaaaaagaagaagaaatgtctactttgatttatatcactagacatttaagaaatataccacggacttcttttatgtctttacatattccgtatattcccaatgctagaatggatcgtattcatgatagaggagaagtatttacattaaaatcatttgcagatgtaattaattggctgcaatttgacgaagtgtttatattagatccacatagcaatgttagcgaatcattaatagatcggtgtcgtaaaatagatgtaaaacatattattcaaaatgttattaatcagattgagagagacgatagtgaattggttttatattttccagatgcaggcgcagcaaaaagatatgcagatatgtttccaaaatataaatattgttatggagaaaaagaaagagactgggatactggcaaaattaaaagacttaatataagactaaataatattaatttattagaggacaaaacggtgctgatgattgacgatattatttcatatggtggatcattatattacagtgcattagcattaaatgataaaaggccaaaacatatatacgcatacgcaacgcacactgagaacagtgtactggatcctaaaaatggaacgttaattaggttactcaatgatggtactgttgaaactttatttacgactaatagcttatacaattctgaacatgaaaaaatatttgttgcaaattttatagattaaaagcgttacaaaaatagggaaagtaagatacgaaaacctccagaaatgcctcgttggttttggttagataaattgttggaggtgtaaaaataagaatggttgttcggggtgtagttatattaaaaaggaaagaaaaagaatttttgggtataaaagaaaagatgtcatggatgataggtaggagagaattagatggacgagaagaaagttagagaaacaatagaagacttaaaaaatttagcagagctattccaaaataaagaaagtcctgctgttgaacattgcaatatagcgatcgaagcactggaaaagcagctgccgaagaaaccagtagttattaacaatactctttacaacaattatcggtgccctaggtgcggtgactatattgttttaggagaaccattttgtttgcgttgcgagcaacaaattgactggtcacgataaacgatataatgtgagttgagtaattgagttacgagttaagtttcctgcaagctgatgactcgtagggaacggaaaggtgaaaaatatgaatagtgaagtaatgtttcaatgttgtaatattttaaaatttttgaaagaaaaaatagaagatataaaaaatatggcaaaagaagatatgactcaagaaaatttagatggttttgagtatgctacaaaaaacattttatcactttttgagtcgttagttaagtgtgcggaaatggatggagaaatcctagtgcatagcagcgacttgaaaccagaatacgaaatcgtagagtttgatttacatgacttgttagcgcattttaattgcagggttatcgcagaaaaaagcatagaatgatgtaaggatgagagaattattttagatcagacgctatcgcctagtagccacttccagaaccatataaaccagatgtgccagaggaggaataactatgtcagataaaaaaggatttatcgttacagatatgccagaaacatgtttggattgttgtttttgttttgaatttgacgaaggcgttgaagcttgttgtagtattacagataacccaaacgacacaagtttaatgagagaaatagacaatgactattgtcaggataagccagactggtgtcccataaaggaatttccagataaaaaacctttgtatgcagaaaatggtgatcgtgcattagattgggaatttaatgttggatggaatagctgcgtaacaaaaatggaggaaaatatgtcatgagtctaagtcctaaatatccaaatttggaattgatagaatataaagcaaaattagaactgaacaaggatacagtctttattcaacgcataagagacaaaaaggaaaatttaaaatatatttatcctggattcgaagtagaagtttttccacagatgtggggttctacatgtacagggattgatattgataactttaataatccagtcatggcaggatctgcaatgacaaaagaatatacgattattatacatgaaattgtgacggatatgtacgtaatattttttggaaattgtcctggatatatagtatatgatccaaaagaagtattttatgaagatttaaaaaatagaaatatggcaagtaagagtgaagcaattcagaaatattaatataagaaaatataggagaaataactatgaaacaagaaaatatcagcatattaagtccaggtgagcgtttcgacttcaagggttttgaatggatcgttcttgacaacaacgtggatggcggtgttctggcaatcatgacttctacttggaataacgaacagtatagcttcgatgatgacggctgtaacaactacgcaaagtcaagcctgcgtagaaagctgctcaatgaactgatccctgtgttaggtgaggataatcttattcctcatgaggttgacttggtagccgacaacggagatgaccgttatggcacagtaacagataaagtatttatcttatcttgtgacgaatacagaaaatataggaaaaatgttccgctgcttcctgaatggatgtggacttgcacaccttggtacatcacgcactccgggtacggtagcaacgttcgtggtgtgtataatacagacggtagtctgtacgacaacggtgcgcgcaacagcagtggggttgctccggcttgtgtattcaatccgaagaatcttaaattgcaccgtcaggtgcaaatggtggaagtcgaaggagaagattattaactatgaaattattcagaaataaaaacacagaggagatgtatatttctcttacagatagtaaagataatttgatggatttcaatggaaatataataacatgttccacagaggattatgaagaggtaaataccaaaccaaagaaacaagagtttcataggtctaattgcactaattgtagcagacggaaatggtatcaaattggatataatgatggatttgaagcgcagcctgaaaaatgggttcctgtttcttctggtaaattaccttcagatggagaagatgtatttgtaacttatcaggacaaggatgatccgaatgaacgatatattgccattacatcttataaagagaggttttttggtacaatatctataggaaaacaatggatgccgccatttgaatattttaataaaaactacgaagttgtagcatggatgcctatgtttgatgagtataaaggagtgtgaaataagatgattgttcaaaaacatagagaatatgaaaaagatagtaagtatgggtgtttttctgtgggaagaagtgaacaggaaatttttgatgacctaaaggaatttgctaaagaacaccttaatgaaagaatttattattatgttcatcctgttagaccaagtaaagaaaactatagaccagaatacatgatggaaataaaattactagataatggcggtatatacattatgccattttggaatcaatatcaataaatattaagaggtgtgatatatgaaagatgatttaatcagtagggaagaattaatcaaaaaaatcactgaacaatacgatatgcagtatggttattatccattgtcaaatattatagattgcattcaaaatcaaccttccgtttataaacaagatgaaattattgaacagttagagaaatgtcgtgatattatgcttagtcctgtatcgcaagattgtttcggagaagaatgtaggtacaatgattttatgggctgtgtatttgcaaaagcgattgaaattgtaaaaggaggtaatttttaaaatggaaagattgacaaaaccaggcgatagtaaatatgtcagttgtaacattgatgacgaatgcacaggcatgtgcggatcatgtccaagaaatactgaaataagaagaagattaaaatactatgaagatttagaagaacagggaaagttggttatagaaggagatgacaaatagatgaaggtatatattgccggaccagtaacaggtgttgaaaattacaaagaaaaatttcaagaagcagaagataaactcttaaaagatggatttgaagtatataatccagcaaagattatggataatatgcctgactgtactacatatgaagagtatatgaaaatgggattttgtcttattgatatggtagatgctatctatatgttggatggatggagaaattcacagggagccaccagggaattgaattatgctcttagtcatgtaaagaagatcgttaatattgaagttgtaaaaaatacaatagataaagaattggagaataatagcaatgaagaaaattaatcctatgttgcttattgatttttataaggcagtacattcaaacatgctgccaaaagatattacaaaatctatgtcttattacacaccacggatgagcagagtaaagcgttgggataaagtcgttatgtttggtttgcagatgttctgcaagacatggttaattgattactttaatgaatatttctttaaagaagacgttaagaatgttgttaatgagtacaagcgtgtgttagatcattctcttgcaccggatatttacgatgtaaataaaatcgaaaaactacataaacttggatatcttccgattgaaattatcgcattaccggaaggaaccatggttcccatgcatgttccaatgttcggaataaccaatactcatcccgaatttgcttggctgccacaggcacttgagagtttgatttctgctgaaatgtggtatccacagatcactgcaacagtaggtaaaacctatcgtgatatcgtagataaatattacaagcttacttgtgatgataatgcaagcagatggacggcactaggatcatttgattttagaggggatactggagtagatgaagcgttaaaagctgcggcaggttggtgtttatcattctataacacagctacagtcccggcaattccatatttggaacaaatgtttaactgtgactgcacaaaagagactgtagcatacggagcagtcagcacagaacatttcgttatgtgcagtaattatgcggtggacggtgacgaagtaacatttttaagaagattgcttacagaactatatccaaacacaagtttttcatgtgttcttgatagttatgattactggaatgtgattgataatattcttccacagattcatgatgagattatggctcataatggatgtatgcttatgagaggggattccggtgattgtgtagaagttgttacgaaaacagtgtttaaactgtgggatcagtttggcggaacggtaaacagtaaaggattcaaggttcttgatcctcatgttaaagctatttatggtgattctattactgttcagagatgcgaggagatttacaagatccttatggagaaaggctttgcttgcagtaacgtagctttgggagttggatcattttccatgcactgtattgaagaagatggcgaacttaaaccatttactagggatactttcagttcttgtatcaaagcttgttatgccgaagtaaatggtaaagagtatccaatctttaaaaatccaaaagaaggtggattcaaaaagagtcagaaaggcttatgtcatgtacattatgatcagaatggagaacttacttattgtgatgagttcacagtaagtaatatcccggatgataatcttttgcagccagtgtttagaaatggcaggcttcttagagaatatactctatcggaaatcagggaaaggttaaatggtgagtgctaatgattaaaattattgatggtaatttactggacgcaaagaccgatattattgctcatcaggtgaactgccagggagcatttaattctggagtggcgaaagctattagagaatttgatgaatgtatatataatgattataaaacatatataaaatatgccaaagaatttaatatatcattgcttggtaaaatttcttttgttttatctgaaaaaaacaatcagttatttattaacatgtttgcacaagacaaatacggttatgatggaaaacagtatactaacattaacgcattcattgaatgtatccgtaatataaggaatttgatggaagatgaggatttaacatctattgcatttccttataaaattggatgtgtcagaggtggtgctgattgggctgttatttacaatataatcaaaactgaactttcagataaaggttataatgttgaattctggagactgaatttaggataatatgcaaatgtaaaataagaaataggagtgaaaattatggcaacatatagtggatatgtagatgcacatacattaaagaataatattattgaatggattagagattggtttgatgaaaacggagaaggatgtaatgctattattggaatttctggtggaatagattcttctgtagttgcagcattgtgtgtagaagctcttggaaaagaacgagtatttggagtaataatgccgaatacatatcaaaacgatattggtgatgcatataagttatgcggacatttaggcattcattatgcggtaatcaatattggacgcacagtatcttcaattacctctgagttattggttaatattggtgatctttcaaatcaaacaatgattaatcttccgccaagaattcgtatgagcacattatatgcagtgtcacagactgtaaatggcagggttgcaaatacatgcaatctatcagaagattacatagggtattctacccggtatggtgattcagtaggtgattttagtcctcttgcaatgctgaccaagacagaagtaaaagttattggtcgtatacttggaatcccaggagaattgattgaaaaagatccttcagatgggttatgtggcaaaacagatgaagataatttcggatttacttacgaagttcttgatcagtatatcagaacaggtaaaattgatagtgaagaaatcaaaagtgtaattgattctatgcatgagaaaaacttattcaaattacagccaatgccacactttgaattttatggaccgaatgttgcagaaaaaacggtggtagaagaatggcaaattatttgatgaaatataaaggtaagtatcgtgtaaaggcccatgttgatgaatctacaaacgattttccaaggaatgtaaatgatcagatagagacggatgatttatatattaagtgtgcttatgggaatcagatttatcattatggaagatccactcttgtagcatatatcccttccattggaagaggacataatattttaaaagcactcgggcaacgattgtgcggaattaataaagacgaaatcaaagactattcagaattatatcaagctcttgaatcagatggcacagttaaagaaatcaaagaaaatgacgaagaaatagaattcaaattcaattctaaaaatatcgaattaatcgcagaatatcttaaacctcagacatgcggtgctgacatcagcccgttctcaactcgaaaccttccaaaatcaaattacactattccagtagaagatttagaagaatataaagcaatcacagcagcagtaccaaaagacgatatcttgcttatctcacatgctacaaagaattttatatcatctgtggtagctaaaagtaagctgtatagatcaaaaaatattaaagctgaaatgcgtaaaagtatgttgaaaggcaaggattttattcactacagtggattctgggatgaatatattaagtttttacataaggagttaaataaatgaagagagtagcaaaatttgaaaaggtaagctatgaacagtttgaaaatgatatgagaaaactaaagtattattttgatgataccataatttatatgtatgagtcgatcatacttccaaagagagcaacaaaattcagtgcaggacacgatttctgttctccgtttgatttcagtttgaatcctggacagactataaaaattccaacaggcattcgctgcggtatgaatacagattgggttcttatgattttcccacgtagcagtcttggcttcaagtatcgcctgcagctcgataatactgtaggagttattgatgcggattattattactccgataacgaaggccatatttttattaagattacaaatgacggagatcaggtattaagaatccataaaggcgaagcgtttgctcaaggtatattttttgagtatggcgttactgaagatgatcatgtagaagagcaacgaaatggtggaatggggagtacggataaggataaaaaggaatgatttgaatggataaaatcttaaaagtaaaagacattcagaaccatcttggtataagtaaaacaagagcatatgaaattattgggctgaaaaactttcctaaaataaaaattggtcacaggtattatgtacttgaaactgaatatgaagaatggttaaaaaacaatcttagaaatcatatattattataaaattaatgggcttatgctataatggcatagcccatttttatgtttaaatgtgacaggatcttaaatgttgataatattattcaaactatttattgcatctattttttgttcttctaggatgtgaatatatacattatatgtgatggatatatctttatgtcctaataattgagagacaacttttatatcgactccgttttttagtaaagcacttccgaaagaatgtcttaattcatgcggtgtacaagtagatattgaacaacctgcccttgtcatcatattagataaggtacgatttacattctgccttgatttaattttcccaccattttcagtaataaagacataatcatcttttttatgtttaggattcaaattcttttcaatttctataatctctaatgcctgtttatttagtggtatggtacggttgcctgatgttgtttttgtactgcttgaagaatttatatatttcttcttagtatcaccatctctgtttttcaaagttacagagctactggttacagacacttttggattcttctcagacaagtctaaatctttccattgaagatcaatcgcttctccaattcttaatccagtgaacataataaacataagtaaatttgcattattcccgtaagtgggtgcgccaattttaccaccaaaattaaaaccgttagtattaacacgttttgattcgatataaagcttattcatatcctcttgagataagaagtgaatttcttttttcttatttttaacatagtcctcatgaggtatttttatttcatcaaggtctatatatgttgaaaaatgattctttttatttccatatttaatacattgagataaaatagcataattctttttaattgatgatcttgaataatgctgtgcaagggcattgcaatatgatacaaaatggtctgtagttaatgctccaacctgtatgtctgataaattgtttccggtaaaattaatcagctgtccattgatgcaatcctcatatccatcaagagtatgtctttttatttctgttccttttacttctaataaccaacgtaaaacataatcgccaaagtattccttttttgtatctttgtgaacttcttttaacggtgtatattttttacgtttttcattgatttctttttcggtttttccatagaaatattttccctctggattcctatagaatttataggtaattcctttaattgtttttgttccccatgttccttccccactttttctctttgccataaaatcacctcaatgaaaaaataatagttgacaaattataataacctatatataatctaacacgtatcaaacggaatgtctactacaatcgtaattgtggtaactttttaccatagtaggttactacatcagttaccacaatagttaccacaatcagaatgatattagatagtatttacaagtacggtcaaggaattgttgtacaattcattatatgtatattgatcttataaaatggcttgaaagcccgtaaatacagtaaaagcaagggttgtaagagtaggtgtttcttgataagctggaatagctcagtcggtagagcacttcactcgtaatgaaggggtcgtgagttcgagtctcatttccagcttttatgatacagatatcagtaagtgatatatacgatccaaataaaatgactgttctttcagaaaatgagagaacagttttttgtttttacaggaaaaaccaggagcaggaaggttgttcaggaaaacggaaatgttgcttttgcaaatggattttggttttgctgacacttgcaatagacagagattatggtatgattaaatatcagtaagatgtttcagatcatgtataaactgacagaaaggataagcgaaaccccatcctttttattggcgatatacttatttatgaggagaaccgttatggatgaaacagaacagcggatcattgatcttatagaagagcacagacaggagattctggattttgccagggatattgaagggcatccggagcctggttttcaggaagtacgaacagcgaaaaaaacagcagagcttctgaaaaaatatggatatgaggttcaggagggaattgccctgaccggagtccggggcggctggaacagccaggacggaggtttggaacggatatccggagcaggaaaaaacgctgcaggaaaaagtacgggaaagtttccgaatatttcagtgatcggggagatggatgccattggatgcaaagctcacccgatggcagatgcgcagaacggcacagcccacgcctgcggccaccatgctcagatggctgtactggccggggcggcaatggcttttgcagatcctgagatcagaaaacagattacaggctctctgacgtttttggctgtgcctgcagaagaatacattgatgcagataaaagaacagcccttcggaaacatggaatctgtttcggttccggcaaaagtgaaatgatccgaagaggagagtttgacaatacagatcttgtgatgacgactcatgtacatatggttccggttgaagaggacttttatctggggaatcctgcctgcaatggttttacagcagaacgagtgaccgtccggggaaaagcagcccatgcagccattgatccctggaatggcgtcaacgcgctaagtattgcctcaagcgccattcagatgatgggactgatgcgggaaaccttccgggaggaggatcatgtgcggcttcacaatgtaatccgaaaagccggagatgtggtaaacagtgtgccggatgaggcggttgtggaaacaaagatcagagcatcttctctggaacggattcaggaagtacaggagatgatcgaccgggcctatgacggagctgcctatgctttcggcggaaaaattgaaagagaaaggattcccggctacatgcctgtccgtccaagggaggcggattcggcgctggttcaggcggcagaggcgttgggagtttcttttcgtactgtgaagccgggagactttaacaatgcatgtacggatatgggagatcttacccagctgtttccggtagtaaattttaccttccggggctttgaaggccggcttcacggagaagatttccggatcacagatgaagaaaaggcatatattcttccggcaaagcttatggcgcttaccatttaccggcttttgagaaacgatgcccggaaggcaaaaaaaatcgtggatgatttcactccggtttttgacaaaaaacaatatatagagtatattgaaaagcaaatgtaaatatatagagttactgatcactccgttcacagaaacctggtcaaaacgcattccaaatcgcttttgttgatggcattttgccccgtatgtcccggaactttggaatatatatcagaacaccttccgggacagtgaggtgcagacagtaacgatataaataaaagcatcccggacagaaaatgtgtgcgggacagaaacagtaaggaggcagtataaaaaacagagatgacagaaaagtgtttggaattaaaaaatatcagaaaaggattttcaaatgaggaggaagttttaaagggcatcagtcttgctattgaaaaaggtgagtttattacccttctgggatcttccggatgtggaaagacaacaacgctacgtattattgcaggacttgaaatgccggatgcgggacaggtgtttctggatggaaaggatgtaactgctctgaatccggaggaccgggatgtaaacacggtatttcagaactatgctctttttcctcatatgaatgtggcagataatatcggttacggtctgaggctgaaaaaggctcccaggactgaaatccgcagaagagtaaaggaaatgctggagctggtgcagcttcccggctatgaaaaaagaaagccctctgagctttcaggcggtcagaagcaaagagttgccattgccagagcccttattaataatccgagggtgcttcttcttgacgagcctctgggagctcttgaccttcagctgagacgggccatgcaggtggaattaaagcggctccagaaaaagcttggcattacgtttatttatattactcacgatcaggaggaggctattaacatgtccgaccggatcgcggtaatgaatcacggaacctttgaacagatcggaactccggatgaaatctacaatcatccccgcacaagctatgtggcaacctttgtgggaaatgcgaatatcctgaaaggagtggcaggagccacagaaaacggaaaggtagctgttaatatttcaggaggccatattcaggcggattcttacaatgagacaatccggcccggagaaaaagtgactctggcagtgcggagcgaaaacataagaattgacgaggaatgttcctgcggcctttcggcagtggtaacggaaaaaacctttgcaggaggacttcttcgggttgttctgaagcttacagacgggacagagcttgtggcaagccgctatggcatagatgcgagagtgcagcaggggcagacagtcagcgtgtgctttgcgccggaggatgcggttcttgtagaccgggatgctgtccgggaaggcggggaggcctgaggatgaaaggaacaaaagcaaaaaagaaaaccacctcagtgtggatgatcctgcctctgtatttttttacgctggtgtttgtggcaggacctcttatttatatggtggctcttagcttcgcccagccgggaagcggaacctccgtggagtggaacctgaccctggaaaattacagaaaaattctggacccggtttatcttcagaccttccgggaatcctttcagcttgccctgaccagtacggtgatcatctgtctggtgggatatcctttcgggtattttatggcaaaaatgtctgatacctggaaaaaaagagccatgcttcttctgatgctgcccttctggatcaattccctgatccgtctttacggatggatcatcatccttcagaacaagggtgtgctgaattatattttaaaggggctgggtatcattgataagccgctgaaaatcctgtacagctatccggctattgtagtgggtatggtttatgtacttctgccctttatgatcctttccgtatattccagtgcggaaaagctggactggtctcttgtggaggcagcccgtgaccttggggcgggaaaaataaaggcattctggaccgtttcctttaagctgacccttccgggacttctgtcaggagtgatccttacctttattccgtctatgggactgttctttatagcggacatcctgggaggaaataagatcgttctggtaggaagtctgatccaggagcagatgacaaggggaaataactggccctttgcggcagctcttgcagtggtgctgatgatccttacctcactgatgatcggtctttaccgtaaaataacaaatgtaaaagaattggagggaatcggatgaaaaaaaatacgaagctctccgggctgtatcttggaattgtgttttttctgatgtatctgccggtggcagtggtgatcattttttcctttaacgagtccaggcttcctgtgcggtttacgggattttcccttaaatggtatcaggagcttttaaatgacagagccatgatcgaggctctgggaaacagtctggtactgggcgcagcaagctgtcttgtttccgcggtgatcggaactctgggagcagtgggactttccagaatacactggaaaacaaaaggggctctggaatatatatccattcttccgctgatgatcccggagatcattctgggaatggtactgatggcattcttttatcttctggatatgccgttcggaatgctgactcttcttctgggccacacggttttctgtgttccctatattctgatggaggtaaaagcaagacttgcaggaatggatccgtctctggaagaggcggcccgtgatcttggcgcaggaagcttccgggctttctgggatattacgctgcctcttattatgccggcagttatgtcaggctctcttctggcatttgccatgtccatggatgatgtggtgatcagtatttttgtaaacggaccccggatctccaccctgcccgtaaaggtttacacacagctgaaaacaggagtgacgcctgagatcaatgcactctgtaccctgatgcttgcatttaccctggcagtgcttctggtgtatacgctaatcaccagactggtaaaagggaaaaacagactcttttcaacaaaacaaaaataggttatactaaaatagtacagattaaaataacagatagaggaggacaacatgaaaaaatcatttgtaatggcgttatgtgcagctctgacagtaactgcggcggcggttccggtcagcgcagattctgataaggagctggtactgtttacctgggaaaatatgttcccccaggaggtactggacggatttgaaaaagaaacaggcgtaaagatcatatattccaactttgacacagacgaaaccatgctggaaaagctttccatggcaaagggcggagattatgacattgtaattgcggacgattacattctggaaaatgtgatccaggaaggcctggcagaaaagctggataaatcaaagctgtccggctttgaaaatatcaaccctctttatcagggccagttttatgacccggaggatgcatatacggttccttatggtgcaggaatccccctgatcgtgtacgatccggaaatggttgacattgatattaagggatatgcagatctctgggatccgtctctggaagacagcattgccctggttgccaactaccgtgtgatcaatggaatcaccaatctgatgcttggaaagagcatgaatgaagaagatgtagattccatcaaagaaaccggagaaaagcttctggagctggctcccaacgtgcgtctgatccaggatgacaacacacagaatgcgcttctgaacggagaggcaagtgtgggctttctttatacttcacaggtaacggctgctcttgcagaatatccggagcttgaagtggtttatccggaagaaggtctgggattcggaattatgggaatgttcattccaagcgaggctccaaataaggaggctgcataccagtttatggactatatccttcagccggagatcgcagcacagtgtacagattttatcggctactacagcacaaataaagcggcagacgagctggtaaatccggatctggtagtgccggattcagtgaaaaaaggcgatattgtacagaatgtaagtgcagaggcagaagagcagtacagcaaaaactggacagaattcaaggcagcctgcgactgacggaaataagggggtacaagatggaaatctacaaagggacagcgaccttttccggaattgccatcggtaaaatactgtattacagcagaggtgaataccagatacggcagtgtctggtaagcaacataaaaaaagaaatccaggaatttcatacagccagactgcaggctgttaaagaactggaagaactttatgaaaaaaacagaagtttgaatgaacaggaggcaaagttttttctgggacagatcagacttctggaatcagaaagctatcagaaagcaattgaaagctgcatttcgctggagaaggtaaacgcagcatatgcgatcatgacaaacagggatgagctgacagaaaccttccggaatctggaggagcctgtggtgcgccggcgcatccaggatattcaggaaatttctgcgcggctgatccgtattctgggaggctcctgcacccggatcagcctgggtgacgagccggtgatcgtggtggcagaatctcttgcgcctacagagatcatggaaatggacaagcaaaagcttctggcagttgtcatgcatcacggttcagcagtatctcatacttctattatgacaaagactatggaaatccctgctcttgtggatatagaagcagatgatgagtgggacggccagacagccattgtggacggttatacagggactctgtatctgaacccggatgcggagatcaagagagaataccggatccgtctggaggcggataaaaaggaaaaagaagagcttctgaagctgaaaaaccagacagatgaaacagcagacggaaaaaagatcgggctttatgccaatatcggaaatatgagcgatctgaacaatgtgctcttttacggtgcggcaggaatcgggcttctccgcagtgagtttcaatatctgggaagagaaaattatccgagagaaaacgagcttttccgggcatataaacagcttgcagaaactatgggagaccgtcttacagtaatccgtacctctgatctgggagcggacaaacaggcctcctatctggacattccggaagagacaaatcccattatgggaaatcggggaatccgcctctgtctggaccggaaacgtatgtttaaggcgcagcttcgcgccatctaccgggccagcgcctacgggaatcttgccataatgtatcccatggtttcctcagaggctgaaatggatgaaattgaggagatcattggtgaggtaaaggaaggattgaaagaaaaagaaattcccttccgcgatattcagacaagcataatgatcgaaactccggctgcagtgatgatcagccgtgagctggcaaaaagagtggattttttaagtattggcacaaatgaccttactcagtatacactggctatggacaggcagaatccccttttgaaaaataaatatgacgatcatcatcctgccattctgcgaatgatccgcatggtggtggaggctgcgcacgcagaaggaaaaaaagcaggaatctgcggtgaaattgccgctgatacagagctgacagaaacctttctccgaatgggagtggatttcctgtccgtagttcctgcctgtatccttccggtaagaaaggctctcagagacaccgatttaagcgtcggtgaggctttggagacagaacgcagcatttaagaaagaaaggcagctcatgaaaaataaaagtaaagtaattcttcttccctgtaattcctacagggaagaacttgtttatgatagtttaaaaaagggattaaagcttctgggcggactggaagcccttatctcaaaagacgaaaaaattcttttaaagcccaaccttctgaagcgggcagaggtagaaaaggcagtgatcactcatcctgcagtggtgggaatgttcgggaaacttttaaaagaagagggatatgaaagagtgattctggcagattcctgcggacatggaaataccacaaaagtcattgccggaacaggaatggacacgtatcttcaggaacttggcatcccggccgttgatttttcggaaggcatccggactccctatgaggaaggcgttcaggcaaaagagtttattcttggcaaagagcttctggaaatcaactgcgtgatctctctgtgcaaaatgaaaacccatgcgctggagcggatcacaggggcggtgaagaacagctatggatttatttacggccttcataaagcaaaaggacataccctttttccaagtgcagacagttttgccagaatgctgatcgatctgaaccagtgcgtaaatcccagactttatattatggacggtattacagccatggagggaaacggcccgggctcaggagatcctgttgatatgaaggttatgctgatgtctacagatccggtggctctggacagtgtattctgccgtctggtgcatctgaagcctcagatggttcccacctgttatcatggagagaagatgggacttggaacctggaaagaagaggaaatacagcttctgaccccggaaggagagctctccatggcagaagctgtaaaaaaatacggaaatccggaatttaatgtagacagaagaatagtaaaatatggaatctgggaaaaaatggcaaaggctttgaatcttttccagaaaaagccgtatattgaggaatccagatgcatccgctgcggaatctgtgtgaacagctgtccggtaccggaaaaagcagtggattttaaaaacggaaaagaccatcctccggtttataattataaaaaatgtatccggtgtttctgctgccaggaaatgtgcccggaaaaggcaataaaagtaaagtgaaaaaaattatcccagaagttttttcatttcccgtatgaaatccggagtggttccgcagcagcctccgatgatccctgcgccgttttccacaagaacctgcatatgttttgcaaagtccgccgggttcatgctgtataccgcatttccctgatcgtcaataacaggcattccggcgttgggcttggcaataaccggaatggaaacggcttcccggatattccggatgacagatacaagctgatccggtcctacagaacagttgatcccaacagccgcggctcctgcgctctcaaaggcaacagcggcttctacggcatttccaccgctgaaaatacttccgtcagcttctaccgtaaccgtacacataacgggaagatcgcagacggaattggcggcatccacagcggccagagtttcctcaatattgatcatggtttctgctgcgatcagatccactcctgcgtttttcagaattgtgatctgttctttatacatttcaaaggcatcttcataggtatattcgccgtcagcagtaacaaactggccggaggtggtaatgtctcctgccacaaaggctttgtttcccgcaatttctctggagtaggaaaccagagtactgttgatctcctgaattttattttccagtccgtgctgcttcaggctcagccggttccctccgaaggtgggggcataaatgatccggcttcctgcttctatataagatttctgaagcttctggatcacatccctgtgctcgatcacccaacgttctgtgcagatgccccggggcattccctgggccataagattggaaccggtggctccgtcaagaaaaagaaggttttctgttaatttctgaaattcctgttttgtcataatagctgcctcctctgtaagctttattttataagtagcctgtgtgcaagctccgcatatcctgcgaaaaggtgcttatgtctctgataacaaaatcgttatcagtttcaggtgtcattatagcattttcaggaacagatgactacaaaaacatagaaaaacgttctgtccggaaaaaatcaaaatacaatataataaagcctttttgcacagaaaaataaggaggcgggagagtgctatgaatttatttgattttacctactgcggaaattataaccgacacattcagaatctttccagaatggttcccgaaaagtggagctttggcgagaatgaggacagaggaatcctgaaaggctatctggagcataccttccagagggtgtatgaagagggaaaggtactggaagaagacagctatgcgatttttaatacaggactttttaattattattatcagcctgtgtacgcgttttttgtgaaaaatctggttccggaccggcagaagtggtttctggaaggattttacacagagtattatttattaaaatcaggaatcgtcagtcttccggagagggcggaatatgtaaaaaatcctgcggatcttgtgtttgattcccgtttggagatcatccctcagtatgagcatatttttggagatgaggaaaatattcagagacttccggaaaatgtcaggacaagcaggatgaaggtacagctttttgacggagccctgcgccagaccagacatatgctggaggctgattaccgcaccgcagtgccccagtattacaatcatgggatccagcttctgatccctgtctgtctgcagaatccgggaaaggcagatctggctcttgcctgtgtaaaaacctcagacggaaaaaaatatctgggcaggacatgcctgaccattaaaatggcttatcacaatgcaagacttcttgccaggcttgacagcagctggctgcatccgtaagggataaaagcgctgaatttctgttaattttaaaaatcgtataaaagttattgaaatccccctgattttgtgatatacaggtagagttgccctgtataaaaacagggggatttttttagggaggaatggtcatgagtaataaactgattgattttatgaatatctcaaaggcgtatgggatgcagaccgttctggatgattttaatctttacataagagaaaatgaattcctgacacttctgggacccagcggctgcggaaaaacaaccacacttcgtattctgggaggctttgaaacaccggatgccggccgtgtgatctttgacggaaaggatattacggatctgccgccaaataaaagacagctgaacacggtatttcagaaatatgcgctttttacccatatgacgattgcggataacattgcttttggactgaagatcaaaaataaaagtaagcagtatattcacgataaaataaaatacgcattaaaactggtaaatctggacggcttcgaaaaccgtatgccggattctttaagcggcggacagcagcagaggatcgccattgcccgggcaatcgtaaatgagccaaaagtccttcttctggacgagcctctgggagcccttgatctgaagctgcgccaggatatgcagtatgagctgatccgcctgaaaaatgagctgggcattacctttttgtatgtaactcacgatcaggaagaggctcttaccatgtctgataccattgtagttatgaatcagggatatatccagcagatcggaacgccggaaaaaatatacaatgaaccggaaaatgcttttgttgcggatttcatcggagagagcaacatcattcctgccaccatggtggaagaccgtctggttaagatcctgggtgtgaattttgcctgtgtggacgagggattcggacagaataagccggttgatgtggtaatccggccggaggatattgatcttctcaaacccggacagggaagcatggacggagttgtgacacatctgatctttaagggtgttcattacgagatggaagtcatggcaaataattatgaatggctggttcacagcaccgatatgtttcctgtgggaacagaggtcagcattcatgtagatccttttgatatccagattatgaaaaaaccggaatctgaggatgaggaggcggtaaacattgaagaataaacgtcttctggcagggccgtatcttttctggtctgtgtcctttgttgtgatccctcttctggtgattgtttattatgcgtttactacagatgagggaggctttacctttgccaatctggcgcagatcacaacgccggaaaatctgaaggctctggggatttccgtgcttttatccctgataagcactctggtgtgcctggtgatggcttatcctctggcaatgatattaagccagaagcaggtcagccagacaagctttattgtattgatttttattctgcccatgtggatgaattttcttttaaggacaatggcctggcagacccttctggaaaagaacggtgtcataaacagtattctgagcctttttcatctgccggctctggagatcatcaatactccttatgccattgttcttggaatggtgtataatttcctgccttttatggtgctgcccatttacaatgtactgatcaaaattgattccaatgtgctgaatgcagcaagagatctgggggcaaatccggtgcagacctttgtaaaagtaacctttcctttaagcattccgggggtgatcagcggaatcaccatggtgtttgtgccggcgctgacaacttttgtgatctctgatcttctcggaggaggaaagctccttcttatcggaaatgtgatcgagcagtcctttaaacagaacagcaactggcatgtgggaagcggactttccctggtgctgatggtatttattattgccagcatggctcttgtggcaaaatatgacaaaggagaaggaggtacggcgttttgataaaaaaatctttgcagaagctgtatctggctctgatttttataatactttatgctcctattgtcaccttgatggtcctgtcctttaaccagtcaaaaacaaggtcaaaatggggcggattcactctgaaatggtataaggagctgtttcagaatgaacagatcatgagcgcgttttataccacactgatcattgcctttctttctgcggcagcggcaactgtaataggaacagcagcggccattgccattcagggaatgaaaaacagatggcgcaccctttatatgggagtgacaaatattcccatgatgaatgcagaaattgtgatgggcgtgtccctgatgctgctttttattgcctgtcgtatgactttgggcttcggcacgatcctgatcgctcatattacctttaatattccgtatgtgatcctcagtgtggcgcccaagctgaagcagacaaaccgccatgtatatgaggcggctctggacctgggagcttcacctctgaacgccttttttaaggtggtatttccggatattgtacccggagtgctttccggatttatgctggcatttaccatgtctctggatgattttgtgatcacgcactttacaaaaggaccgggaatcgataccctctccacaaaaatttacacagaggtgcgaaaagggatcaagccggaaatttatgcgctgtccaccattatgtttgtgacagtccttgtgcttctgatcctgatcaattattctccggaggaaaaagaagaaaccagaaagaagcgggtgaaaaagccgtcaaaggtaaagaaagtactgttccgccgtgtgatcccggcagtgatctgcgcagtttttgtgttcggcggcttttattacgcacaggaaagcaatatgatgaattccgaaaaagtggttgtttacaactggggagaatatcttgatcctgaggttcttaccttgtttgagcaagagacgggaattgatgtcgtgtatgaggaattcgagacaaacgagattctttatccaaagatcagctccggcgccattgcctacgatgtgatctgtccaagtgattacatgatccagagaatgatagaaaacgatcttcttgcagaaatcaattttgacaatattccaaatgtgaagaatattggaaaggattatatggagcagtccagacagtttgacccggaaaataaatattctgtcccatactgctggggaaccgttggtattctttacaacaaaaccatggtggatgaacctataacaagctggtctgttctgtgggatgaaaaatataaggacaatatccttatgcaggattctgtgagagatgcctttggggtgactctgaagtatctgggatattctctgaattccacagatctggatgagctgactgaggcaagagatcttctgatcaaacagaaaccactggtgcaggcttatgtgatcgatcaggttcgcgataagatgatcggaaacgaggctgctatcggagtgatctattccggagaggctatttatacgcagatggaaaatcctgatctggaatatgtgatcccggaagaaggaagcaatatctggatcgattcctgggtgatccccaaaaacgccgagaataaggagaatgcagagaaatttattaacttcctttgcagaccggagattgccctgatgaattttgagtatattacatactcaacaccgaatagcgaagcccggaaactgatcgaggatgaagcgatccgaaacagcgagatcgctttcccggatctttccaaatatgataacctggaaaccttccagtatcttggaactgaggcagaccagacctatggggagctgtggaaccaggtaaaatcacgttgatataagaaaacttaagagatttgctccgctttgcgcgccagatgcagactgccacaggcagtcatattccaaatgtatctggcggcatctttgcggagcattttttatttgcaggatcagttttttgctatctttgtttcgtatatcgtttctcgatcagattcaggatgctgtaaagccccattgcaatgatacacagcacaagaatcgccatcagaacagtagtaagcttaaaggtctggctggaataaataatcagatagccaagcccctgtctggctccgataaattcaccgatgatgacacctacaagacaaagaccgatattaaccttcatgatgctcaggatcaaaggcacggaggagggaaggacaatttttgtcagctcatcctttttgtttcctccaagggtggcaatcagctttcgtttatcagggtctgcatcctgaaagcctgtataaagattgatcactgatccgaaaatcgccacagacatacctgcaacgatgatagttcttacatttgcgccaagccatacgatcagaaggggcgcaagggcggatttcggcaggctgttcagtaccacaagatagggctccagaatttttgcaagctttggaaacatccacagaagcactgcagttccgattccaaggatcactacaaaaaagaagcttaacagcgtctcagtaagagtgattccgatatgagtaaaaagagactggtttctgcacatgtcaaggaaatttaaccctatggcagaaggactgctgaaaataaaagagtcgatccaaccgatacgggcagagacttcccacagagccagaaagcctgcgaagagaaccagtctggaaatattgacaaaatatttttcccgtttcagccgggacagatattttgtctgggcagaggaaaggtcaggcatattggttcagctccttccagatcagattaaaataagatttgaaatccggcgcatttcgcgaggaaagaggcgtgcggttttctatatcaagatgaatggaaacaatttttgccacagatgcagggcgttttgtcagaataatcacccggtctgccatactgatcgcttctgaaatgtcgtgagttaccagtatggcgggcttgttttcttttttcaggattttgccgatatcatcgctgacattcagccgtgtctgataatccagggcagaaaacggctcgtcaagaagcagaagctccggcttcagcgcaagggtacgtatcagggctgccctctggcgcattccaccggataactgagagggacgggcagaacggaatttgtccaaaccgtaggtgtgaagcattttttcaatataggacagcttctcaggggtaagctcccggcgtacttccagtcccaggagtacatttttgtaaatggtccgccattccagaaggtgatccttctgaagcatgtagcccatacggggatcaccgcgggaaaccgatgtgccgttcataagaacagaaccctgctcaggagccagaagcccgcagatcacattgagcagagtggattttccgcagccggaaggccctacaacagcgagaaattctcccggcatcagatcaaaggatatatgagaaagggcggcagtttccccggaaggcgtatggtaggaaagagaaacatctcttacttccagaagtggtttcatgaaattacctccatatctataactgcagcagttcagatgaaatctgaaaatgctatatgttatgatatgcgtaccgggaatcttgtgttatgacaaaaaatgaggacgttatttagtggggggaataagtacagatttaagtgattttatacaagtttaccaagatgattttatttaatattcacaaattacagaaattatacaaaaacctgttgccttttatcaggcaaagtgttattatcagtttaacagttaaccggttaacttaaagagaaggagggaaatgtgagaagggtaacaatcaatgatattgccagagaatgccagacttcaaaagcgacggtatcctatgtgatcaatggacggtataacaaggtttctcaggaaatggttgaaaaggtagaaaaagcggtaaaagatctgggttatgttccaagtctcagtgcgaaatctcttgcaggaagagaatcaaacctgattggtgtgatcattccgcagatggatgttggtgaaaagctggtatttgataatcctttttacagcgaattcttgtccggattggagtattatctgcgaaaagcaggatgcggagttgtcttaagcgtgattaataagcacaatggatttgaagagatgatcaaaaaatggaacttggacggtgccgtggtctttgggattgataacgacaagatgctggattctcttggtaaatacagatttccggttttattgatagactcctatattacaaaaaccggatatcacagaatgaacatccgtgatgaagaagcctgctatgaggcgacgaaatttctacttcatggggaacaggagcctattgcactggttacaggtcagtatgagaagagcgggcttttgcagcagcgtgtaaacggttataagagggctctctgtgaagccggctgtgaagtggatctgtctctgatctatcagggggatatcactcacgaatatggaatggaagctgcagaaaaaatcctgaaacgacagggtgtgaacaaaatcctggcaacagcggatattttggcttatggtatactgaaccagcttcagaaccatggcaggaagattccggaagaatatgaggtaatgggatttgacgatacctatcagtcaagaaatatgtatccccgtgtcaccaccgtgggacagaacatcctgaagagaggcgaaaaagcaggagaactgattctgaaaattattggtggtcagcaggtggaaaaagaaaactatatggattttcagatcatagagagggatactaccagatgaaaataaaataaaaaacaaagaaacaatatttttttaacggtcagttaaccgtttaactaacggaggatgttatgtataagtcaaagaaaaaaataatttttacatttttgtttcctagtttattaggccttgtggtattcaaggtgggagcgatgctgtattctctctatatcagttttacagaatggaatttatttggcgcaccggaatttgtaggcctgaaaaattatatcacaatttttcgggatcccagattttatgaatccttaaagaacacccttctttttatagcagggtatctgcctgtggtgctggtgctttccatggggattgcgcttttgctgaattcaaaggtaaaacgtgtaaatattttcagaggtctgttctttcttccggtaattacttcctgggttgcggtatctatgatctggaaaggactgttaaatccggaatttggaattattaattcaattatagaattttttggaggaacaggaccggcatggctccaggatcctgcgtttgttcttccctccgttattatggtaagtgtgtggaaagacgtgggattcctttccatcatctttcttgggggacttcagggaatttcgtcagagtattatgaggcggcgcagatcgacagtgctagtaaatggcagcagttcagaaaaattacgttgcctttgttatctccaacaactttttatgctctgatcattactattattaactctttccaggtatttgatcagatctggatcatgacagcaggagaacctacagcggatcttgttccggtcatggtgaccgagatttataaaaacagtttccagtatcagaaaatgggatacgccactgcattatcctggattctgtttgcaatcattatcggtgtgacaattttccagaacgtgatgcagaaaaaatgggtgcattacgaataaggagaggaggaaagaatcatgacaagaaacaaaaaaataattgtatatattttgctggcgctgggtgcttttattatgatcgtgccatttggatggatgctgatcgttgcatttacaaagccggatatcacttatcagatgacattggagaacattataagttccctgtcgctgaataatttcagaactttattttcagaatataacatgccaagatatgtgctgaacagtgtgattgtttctgtaatctcaacagcagggcagattcttctttgtgccatgtccggatttgtgtttgcaagaattgattttaagcataaagagaagatttttattctgtatcttgcaaccatgatgatcccggtacaggctaccgtaattcctcagtatatactgatcaacaaaatgggactgatcaatacttatgtaggtttgttccttccggggattttcaatgcatttggaactttcctgatgcgccagtattttatgggaatccccaaagcgctggaggaagccgcctgtctggacggagcaggatatgtccgcattttcttccagattatgctgcctcttgcaaaaacaggtatcgctgttctggcagtgaccagttttatgggcgcctggaacgatttcctgtggcctctgcttgtagcgtctgacgaggcgcatacaacactgccgctgtttttatcacagttgcagggccgctggtatgtggactggagtgttctgatgggagcaactctgatcagtgttctccctattcttgcagtatatttatttgcccagaaatattttattgaaggtgtacagaatacaggtatcaaataaaaagaaaaagtttaatgaaagagagaaaaaaatcatgaacaaaaaaacagcagcaatggttctctgtacagttatggcagcaggtgtcctgacaggatgcggcggcgcagaagagaaaaaagacggaaaaacaactattaagtatgcaacgtattcagcgggcccggatcatctggaggatctggataaaatggtggcagaatttgaaaaacagaatccggacatcaaggtagaaacagaagtgatcggatacgacgattattttaccaaactgcagacccaggcttcttccaaaactttgccggacgtatttgagatgaactatgaaaactttaatacctatgcaggcaatggcgtgcttctggatcttacagaactggcagaaaaggacgaggagttttctgaggatatgctttccggaaattcttatgaatatttccagaaagacggaaaattatacggacttaccgagaaaatgtcagatgtggtaatgtattataacaaagatctgtttgatgaagcaggcctcgattatccaacagaagactggacctggaaggaagaactggaagcagcccagacacttacaaaggaaggcgtctatggaacgtatgcaccggtaacttataatgaattatataaaaccgtagttcagaacggcggcgctctttttgatgaaaatggaactccgactcttggttcagaggaaaatatagaagctttccagtggatgcttgataaaatgctggaatataatgtacagcctactccggagcagatgagcggaaaatcacctgaggatatgtttaaaaacggtgaggtcgcaatgatccgtacaggaagctggatggtaactacctttgcagatacaccgtttgaatgggacattgtacaggaacctggaaatacacagaaagcgcaccatgtttttgctgatgcagtagtgggaagcgcagctgcaaaaaataaagaagctgtatggaaattcataaaattcatgtccacagacagcacagcggcagagatccgtctggattccagctgggatcttccggcagtaaatgatgaaagtgtacaggaaaaatacacaagtcaggaaaaaccggaaagcagagaggtaatctttgatgtaatggaaacaggaatcatgcctcctgtcgtagatcattactcagaagtacagaatgcgatcaatgaggaactgaaccgcgcgatcattggggagcagagcggagaagaagccttacaggcagcccagaaaaaagtgacagatattttaaaataagttagaaccagagccgcaaactacattgtaaaatataatttgcggctctttaaaaaaggaacaggtggaaacagaacatgcagacaggaaaatataccggaattggactcattggaaatgaaaatattgctgcaatttatgcagtgaataatggaatcgttgatattaacgggactgggatttaccatttgttttataaaacttatgcccatgatcttatacagtcggcagtgtcgctgatcagagtaaaagatacgatttattatggaaataaggtctggaaaaaatatacccatccgacacacataaagccagtaaagacgtatgtggaagatacctacaggtactgcgatgaatttcttctggaagaacatgggttaaaaagaaaagatgtggtctattcttatggagaacactgcctgagctttgagatggaactggaaaacgtttcagaggaagaactggagattgggtgctacggctactgtgcagtgcgtaacgatatggagattgaaacggaaaaaatgcacaatggtacccttggaatccataccggcgatgcatatatggttatgaaaacaccatgggcagaagaaatctatgcagtggaagactctccgacagactttgcctaccaggtttttctggatatactggaaaaaagagagaacagtcaaagaacaaagacaagctgcaggcttggttatgtgcagggaaggacaaagacactgaagccgggggacaagctgcatatgtgctggtctctgatattcggagacagctatgaagaactggaaaaggaactttgtctttcagaggaggagacttttaaagcggcagaatactggaaaaattggatggcagaaggagaaaagccagaagattctgaatttcaggagcaggcgcttgtgaacctgactgctcttaaggcagtctgtgttggcggctacataccggctgatcttaccggacattatttctgcaataaaatgccctgttattatgccagagattccattatggtggccagagctttcctgctttccgggcatctcagagaatgcagggatatcattgcctacctgatcggaagaaaacggaaagaaaacggagagtttttccagcggtatgacggatacggggaaccaaatgagggagcaaataacagtgtgtttcatcagattgattccattggttatttctgcagaatcgtttatgaatattataaaaagaccggagaacttctggcggacgagacgcttctgatggaagtgactgacgtaatagacggagcggagaagaagtccggaatggcgggaccagaaggcggcgtcaatgaaggcgtattcggcccggcctttatcacctcttccaatatgtttatttatggaggcatcctggcagcaaaacagatctttgcgattctgggaaataaggaatatgcggaaaaatgccggaagatctgtgatcggctttatgaggggattcagtctgcctataatgaggaactgggaagatttgactatggctatgtgacctatcatgaccatacagtacgcaaatatgatacacctcagtattttgggcctttgtacggatatcccaacgatgaaaaaatgcagaatactcacatttatctgagacaatacgcttctttctttgaggacgggatcggttactcggagcaggaatatcatcatggaccgtggctttttaacacactggcctgtgcggaatactgcaaacgggcagaaaacagagaagaatacattagaaagatgaagtgggcatctgaacacagcaacgcatacgggcttttgccggaagcggtagatgcaaatgatgaaggtgtatgtgtgatcaatccgttaagctgggcctgtggagaatttgctgcagcttatttcagtaaaggaggttttgttcatgagaaataaaaaatggaaactggaattattaaacatgctgaaatcctgtatacaggaaaaagtacaggatttaaaagaaccgttagagcaatttctggaagaaaaaaatacagattttcatgaccagtgtctgattttatttcttgtgggagaatatacaaggatttccggggaccactttttttataaggaaaagaagcagaagatcgcagaacttcaggatcacatagaagaagcggcatatcagccctgtggacggatttcaggagaaggagacggcttttttgcagaaaatttcggaatggcttatggcgcgctttataacagtaacctgttcggaaaacgggaaaagacggcagaggcaattcatcagatgaaaaattatgcctatgatcattatacctgtgcaggaaggcttgcggatgaaaaacacggagatctggcaacgccgcagctgctctgggtctgtgttccctttggactttttactccggaagacctggtgattgtggcagcagtccagtctatgaaggaaacaacagaccctgcagatttaggaatgctgggatggtattatgcagaaaaggcagactacaggaaagcaagaaaatatttgggactgttgaaagaaacagagaaaaaagaggaaatctctgaagccatagaagggattatcgaggaaaagcttaagattgcaggtatgctcacagaagaacctctgatccatgtgccgaccggtaattttaaccgatacgaacaccagaattacgagcgtgatccctggtttccaaaagcaggggaaaaggttgctttaaacattgccacctggccggtaaagtatccggaagagatttttgtttactggaaaacagacaggggcagagttggaagtggacagggaacttatcagccggaatatgaaaattatcgattccagctggggagttttgaaggcggagagcaggtgacttattattttcaggccggaacctgtacctctgagaaatatcagtttactgtacagaaaaaagaaagaatccgtttatttggagaaaaaagagaaaaggaaaatggttttgaactggaactacgttccggagaaaacaaggtatatcttctgaaaaaaacagttgtcaatggagtttctctgttccagattcttccagatcccagtgagagaaccttggaagaaacagaatggaagccactggaagatctgaaggaaaccggactttccggaatacgggagatttatttctggaaagaaaaggaacagattatgtccacaggaatctgtacagaggcagaaaaagaagagggcttttacggttttggagagagatacaaccatattaatcagagaggcaatctggtggacgtgtatgtgtataatcagtataaggatcagggaatccgtacctacatgcccatgccatattttttgagttcggaaggttacggcatctatcttccaacaaaccattacacagagttcgatctgtgcagtacagaagagggttgctggaagatggaagcagagaccgaaggaatctgctggtaccggtttaatggaactccaaaggaaatgatcgggcagtttacaagccttacaggaagaccggcaatgcttccgggatgggcgttcggaccctggatgtccagcaataactgggacagcgaggccgaagtccgcagacaggtagaactgacaaagaaatacgatattccggcaactgtgcttgtgatcgaggcatggagcgatgaggctacctattatatctttaatgatgcagtatacgaagaaaacagcggaaaagacggattttcctacagcgacttccagttcccggaatggggaaaatggccggatccaaaaggaatggtagaatatcttcatgagaatggtctgaaatgtattttgtggcagatcccgatcattaaatatatcaattctcttcaccaccttcagaaagacagagatgaggcttacgcactggagcagggatattgcgccaggaaaaaagacggaacaccctatcgtatgccggagggatggtttacagacagtcttctgatggattacaccagtccggaggcagcttcctggtggatggataagagaaaatatctggtggacgaagtgcagatcgatggatttaagacagacggtggagagtttgtatttggggaccaggtacagtttgcggacggaagaaccggaaaagagatgcggaacgagtatccaaatctttatatccgggagcattatcaatatatccatgaaaaaagggacggtattgttttcagcagggcaggatttaccggggcttcccagatgcctgcgcactgggccggagatgaaaaatcaactttttctgcctttaagagaaacctgtgcgcaggcctgaatgccggaatttcaggggttcctttctggggatgggacctggcaggcttcagtggtgagattccaagcgcggaactgtttgcccggtctgcggcaatggcagcattttgtccgatcatgcagtatcatgcagagagtaaggcagaatttaatcaggatcgtacgccctggaacattgcagagagaagaaatgccccatgggtactggatatttatcgctattatgcgaagcttcgtatggctctgctgccttatatcatggaggaggcagaaaagtctgtgaagacaggcataccgctgatgcgcgctttgtggctggaatatccagaggacaaacaggcaggggaaatttatgacgagtatctgttcggagacgaccttctggtagctcctgtggtagaagagggcagcacagaaagggaagtctatattccagaggggttctggaaacatctgtttacaggtcaggaatttgaaggcgtacagacggtgaatatgaaagcagagataaatgagattattgtacttcagaagaaagaagcacagtgggaaataacaagagatgaaaatggtgagtttcagatgatgaggagataatattatggaatggtggaaaaaagcagttgtatatcagatctatcccatgagttttaaggacagcaacggagacggaatgggagatcttggcggtgttttggaaaaagtagattacctgaagaaactgggagttgacattgtctggatgacacccatctatgaatcccctatggatgacaatggctatgatatcagtgattattataagatcaatccgctgtttggcaccatggagcagtttgaacagcttctggacgctcttcatgaaagaggaatccgtctgatcatggatctggtagtgaatcatactagcgatgaacatgaatggtttcgtcaggctcgaaaagacaaaagcagcaaatatcacgattattatatctggaaggatcgtccgatcacagatcaacagtcctttttcagcggttctgtgtgggaatataatgaggagacagaggaatattattaccatctgttcagcagaagacagccggatctgaactgggataatccggaagtgcggaaggaagtctacaaactgatcaactggtggctggataaaggaatcgacggattccgtatggacgtaatcgatctgataggcaagataccggaagaaagcatcatgtacggtgaaaaatcccataaatacctgcaggaaatgtacagagagtgctttgaaggaagagaagcctttacggtaggagaaacatcttttgcaactccggtcagcgctcctttgtattccgataaggaaagaaaagagctgacaatggtgtttgggtttgagcatctgggattagaagaagtaaagggcaatggtaagtgggatctgaagcctctggatgtcaatgaactgaagcaggtatttcttgtatggcagaaagcccttcatgaaaaaggatggaacagtttattctggtccaaccatgaccagccgaggattgtttcccgtatgggcaatgacacggtttaccggaaggaaagtgcaaaaatgctgggaatgatccttcatggaatgcagggaacgccttatatttatcagggcgaggaaatcggaatgaccaatgtaaagttcgctctggaggactataaagatgtagaaaccatcaatatggtgaaggaaaagcaggaagcaggctggtccatggaaaagattatgaaaggcatttatgcaaaaggcagagacaatgccagaacaccgatccagtggaatgcaggaaaaaatgccggattttcagaacatgagccgtggatcggaataaatcccaactataaagagattaacgtggaggaagcgataaaggatgaggattctattttccatttttatcagaaactgatccgtctgagaaaagaatatgagattatcagcacaggagattttgagcttttatttgaagaggaccggagattttttgcatataagagacaggcggatgacaggacgttggtggtaattgccaatttcaccggagaaagcgttgtctgtgactgtacagatgagattacttttaaagagggcagagttctgctttccaattatgacagaaattctgtagaaaaaatcatgagtctcaggccttatgaagcagtaatgtattatatgtgatattgtaataaatgccgccggagtttcattcagtgtttacagcattttaattatagtcctgggtttaagtgcttttagtgataattttttatgcattttgaaatataaaaaatcacctttctaaaaagaagggtgatttttaattaaaaataggtgaatatcttagatgcaaataaagggtagtgtgtaaagagaaacaattatcattcgatttagtttgcaatctattttaattttccgtaatacatatcattgaaaataccctcctggcttatgagctcctggtatttgccggactgtaccacctgtccatgatccataacaataatattgtcgcagtttttcagggtggtaagcctgtgggcaatagaaatgatagtcatgttgttttcctttttcagctgttcgatttcattttgtataaaacgctcagaggtattgtccagagctgaggtggcctcatccaaaatcagaatttccggcttccgtaaaaagatacgggcaatggcgatcctctgtctctggtctccggaaaaattattgcctccctcgctgatctttgtgtgaattccttccggcagactgttgacaaaatcatagagattggcttttgtgagggcttcttttacttctttgtcagagggctgctagttcagtccatagcagatattttccagtatagttccggcaattaaaaatggattttggggaaccagagctatgatccgggacaaatcctttcttgataaagagagaatgtccatattgttgataaaaacagaaccactgcatttttccagcttacagactgcttttatcagagaggattttccacagccactggggcctgcaattccccagaaagagcctttttcaatactcagatccagattttttataatgtttttttcgttattataggaaaaattcagattgcggatatctatcatataagggccggagttttcctgagagggtacacctgaaattgcatcataggaaaaatcatgaggaatatctgccattttgaaaaagtcttctgccaggatcaggctttcggaaagttcgtccagaatcctgtgaagctcttccagaggtttgataagctgcgaaaaacaaagataggaggtgagaacagctcccacactgatttttccctgtgctgccagccaggcggaagtaccgatcatcagaacagtaaaaaacacttcgttgataaatttgagacagtcatattttgtcatttgtaaatggtgtctcatttctttgcttcttaaatattctgatctgtccgtaaatcttttttcctccagggtattgctgtctgtgattcgaatcacttctatgccgttcaaaagttcaacaatggctccgtccatttgtgcttttgattccagaagttctacccggattcccttttgtgtatgaatttgccggaaaacaattgcaattccaatggggacaacaaggagcatcagaacggcaagcttcaccggaagggtggtgaagatcacaacaatggctgcgatactgttaaagatggctggagcgaagtccataaaaataagcttttccagctttacagtgccttccagacagcggtttaatctgccatggatatttccggtcatgtgatccttaaagtaggataaaggagccttcagtaaggaagcaatcacaagtccccgtgcttttttctcagtttttgtggcaatatcctccaccacaatccttcgtaatatttttataacttcatttgcaacatttacgatcagaataaaaaacagtatgggaaaaattgaataaaaattaatttcagtctgggaaagaatatcgtctgtcagccagccgatcgccttgggagtgagctgcgttaagacggaggacaggatcatgatcagcataataaacaaaaaagttattttttgcttccagtccaacaggcagtgtacattttttaaaatctgttttggattcatatgggaatcacctctgtttctgtatattttttgtatcaggtatgagccaattatacttgccacgaagtcaaaagccgagaaagttttgcatatctgtgtaaatcctaaaatttcatttcagttgtctggatacagcagctgtttttgttgacggtgcctgtaaaaagggataaaatatgacccataagaaagagggatatcaacggcagaacaaaacggcttttgtggcagacgtgctgttgtctgctgaaaatttaactgatttataaggagtaaagaactttacatgaacaacagaaattatcagagagagctggacgctctgatcaccggttttgaaaaagaaaacaaggtgccccggctgtttcttcacagttgctgtgcgccctgctccagctatgtactggaatatctgtccaaatattttgagatcacagtctttttttataatccaaatatttctccaaaggaggagtacgaaaaaagggtggaggagatccgccgcatgatcggagaaatgaattttattcatccggtaaagctggttgagggaacctatgatcctcagatttttttccggatggcaaaagggctggagcaggttcccgaaggaggagagcggtgttttcgctgttatcgtctccgcatggaggaggcggcgaagctggcaaaggaaggcggttatgattattttacaaccactttgtccatcagtcctctgaaaaatgcgcctaaaataaatgaaatcggagaagaactggcagagatttacggagtggcccatcttccttctgatttcaagaaaaaaaacggctacaagcgttccattgagctgtccggagaacatcatctgtaccgtcaggattactgtggctgtgtattttcaaaaagagacagaaatgaataaatatgcaaaaaatattctttttgtttgatttttggaaaaagtgtgatatactggtagcaatcagccggaaacactgtgaatgcagggcgttatttgatgcggaaaagcagttgctgaatggttaattattaatattatacagaaatgaggagtaattattatggcacagttatggggaggccgttttacaaaggaaacggatcagcttgtttataactttaatgcttcgatttcttttgatcagaagttttatgagcaggatatcagaggaagcagggctcatgtaaaaatgctggcaaagcagggaatcctcacagaaaaagagcgggatcagatcctggaaggtctggaaggaattctggaagatgtaaaatccgggaagcttgagatcacttccgagtatgaggatatccacagctttgtggaagcaaatctgattgacaggttcggtgatccgggtaaaaagcttcacaccggaagaagtcgcaacgatcaggtggctctggatatgaagctgtatacaagagatgaaattgacgctattgacggtcttttaaaagagcttcttgtggcttttcagaagatcatggaagagaatatccatacctacatgccgggctttacccatttacagaaagcgcagccggtaactctggctcatcatgtgggagcatattttgagatgttccggagagacagaagccgcatggcagatatccgaaaaagaatgaacacctgtcctctcggggcaggggcgctggcaggaaccacctatcctcttgaccgggaatatacagcagagcttctgggctttgacgagcctacaagaaacagcatggattctgtgtcagaccgggattatgtgatcgagcttctgtctgctctgtctacagtgatgatgcatctcagccgtttttctgaggagatcatcctctggaattccaatgagtaccgttttgtggaaattgacgatgcatacagcacaggcagcagtattatgcctcagaaaaagaatcctgatattgcggagcttctccgtggaaaaacaggccgtgtgtatggagcactgatatccattctcacaaccatgaagggaattcctctggcatataacaaagatatgcaggaggacaaggagctgacctttgatgccattgatacggtaaaaggctgtcttgccctgtttacaggaatggtttctaccatggaatttcgtaaggatgtcatggaagccagcgcaaagaacggatttacaaatgccacagatgcagcagattatcttgtaaatcacggtgttcctttccgcgatgctcacggcattgtgggacggctggtactgacctgtattgaccggggaatttctctggatgagctgccccttgaagcttatcaggagatcagccctgtttttgaaaaagacatttacgaagccatcagcatgaaaacctgtgtggaaaaacgctgcacctacggcgctcccggttcagaggtgatggaacaggtgatcagagctaatcaggaatatcttcaaaatcattgaaacataagaaaaaacacttgcatttttccaaaaagtgttatagtatttacaagaacgacaaatgtatgcaatacaaagacatgaagtgaggagagcgattattatgagcgagaaactgagagtcggtattttaggagctaccggaatggtaggacagagatttatttctcttctggaaaatcatccgtggtttgaggttgttacacttgcagcaagcccgagaagcgcaggcaagacctatgaagaggctgtaggcggaagatggaaaatggatactccgatgccggaagcagtaaaaaatattgttgtaatgaatgtaaatgaggtagagaaggttgcggcaactgttgactttgttttctctgctgtagatatgtccaaggacgagatcaaggctattgaggaagagtacgcaaaaacagaaactccggttgtttccaacaacagcgctcaccgctggacaccggacgttccgatggttgttccggaaatcaaccctgaacactttgacgtaatcgaattccagaagaaacgtcttggtacaacaagaggctttatcgcagtaaaaccaaattgctccattcagagctatgctccggttcttactgcatggaaagaatttgagccatatgaagtagtggctactacatatcaggcaatttccggtgccggaaaaacctttaaggactggccggaaatggaacacaacattattccgtacatcggcggcgaggaagagaagagcgagaaagagccgctgagactgtggggcaaaattgaggacggtgtgatcgttcctgctcaggaaccggtgatcacctgccagtgcatccgtgtaccggtactgaacggccatacagcagctgtttttgtaaaattccgcaagaaacctacgaaagagcagctgatcgaagctcttaaaaacttcagcggcgttcctcaggagcttgagcttccaagcgcaccgaagcactttatccagtaccttgaggaagacaaccgtcctcaggtaacagaggatgtaaattatgagaatggaatgggcgtttctattggacgtctccgtgaggataccgtatacgattacaaattcgtaggtctgtcccacaatacagtaagaggcgctgcaggcggagctgttctctgcgcagagactctgaaggcaaaaggattcatcacaaagaagtaaatattggcaaattatattaaaaaagcaggctgccggctctggctcacagagatatggtagcctgtttgtgtatgttttgggattttggtacaggatgatcaaggcagaaatggtgagggatttttcgtatgattggcgaaaatccatttgtgcaagataaattctgctatacgaagtggaatttttgcattttaggttcaataacaatctggaaaataaataatgacagatgaatttttggatgatataatcatataaaataaaaattcagaaaatatatagcggattaaaattcaggaggagagctggtgaagaaacaaacaatgtattgttctattggtctgcttatcctggtaacaggtcttctggcattgcgtttctggtatgacagtaaatgcgtaaaattccaggataaaaatatggaaatacagacgctttatcttctggattcaggaagaggaagtgtgctgaaggaagaagcagaccggattaaaagcttttatgtaacagacacctccgggcgttttgagacgctggaagatctgaaattatttccaaatctggaagaactgcatctgacatatgacacaggcagtatgacagatgaggaaaaggaagaatttcagaagcacagagccggaattacaaatatgctggaggaaacgcttccggagctgaaaaagctgagaaaattaagtctgacatattttgattattttgaagatctggactttctttcagaatgcaggcagatagaagaactggatattaattataacattatcaaaaatattcgtgggctgagaaatatgaaaaatcttcgtattttagatttggcttataatccctttactgatatttctgtcttgtctgaactgagaaaactggaagcagtaaatctgtacgaggtttctgtggagaatctggaggttttggcagagcctccttccctgaaattaattgtttatgaaccaaaagataaaaaacaggaggaagtcttacagaaattagaggccggaggtattgcggtatacagagaaaaagactatagaacaggatttgattatctggtcagagaaatggaagaagcagagcagtaaacatacaaaaataaagtccgggagggaatgctatgagtaaaagcagagatgctgtaattgctgtaacggcaaccatatttttcggtgtgttttccagagtgactgtgcgcatcccctacatggtctggggatattttgacgaatcattttttatttcatttgtatggtggcttctttatgcaggaagcctctatgtggcaataagagagtatatggaaaatgttgacggttattttaaggtgatccttcaggcggggctgttcggaggggcagcagctttgataaaaacagctgccgatgttcttacagagcagataataatcaatatgaacagcggaaatgctgtaatttcagtgtttgttatggaactggaactgctgatttttggcagtggcgtgatggtgtttttatattattttgtggcaaaaaagaaaattttttcatggaaaaaatccttacatgtgtatgcggggatcatagcaggcgatcttgcggtttatattggaatgatctactattaccttctgaaaacagactgggcgctggaacggttttctggtgcagttcaacaggttggcgcagaacaggcaaagctgaatctgacaacaaaattcgctcaggaatccactggcgtggggatgctggtattggtggcattttttagcacactgtggttgggaatgcgaaaaaatgcagaagacaggagaaggtgaagaagccttgaaaccggttaaatattaaaagaaaatatcagcaatatttactggcggtgttcggattcccggtaaaatgaaagaccattcattgttgaaagagaatcatcaaataggagaataaagatgaaagtatatattgcaggtccaattacaggcgtaagtaattataaggaaaattttcaagaagcagaagataggctaaaggaagactttgatgtatataatccagtaaaaattatggctaacatgccggattgtgctacagatgaagagtacataaaaatgggattctgtattattgatatggttgatgccgtttatatgttgaacggatggcataaatctgaaggcgctaccagggagttatattatgctgtcagtaaatgtaaaaaagtattaaattttaatcctgataagtaagcttgaacggagaaatttatcaaggagaatgacaattaagagcattcttttgtctggtgaatacgattaacgtttctattgaagttggattttagataatggattaagataggcaacaacaatgatacgtgttatacttacatacgaaagataaaagatatattttgcagaaatcttggctatggtatcaactttgtagattgatagagaatcaaatggaataaaaaaggaagtgaattgaatgcttaacatttattatggaaatatgaaagaggctgtatataacacagcagcttattttaaatatgattatgaggacagttggattgtcgatccttttgtgaaggagatgattcaggatgtggatcagtcaacagttctggacagcggtgtaattgacagtcctgtacttggtaaaatttcacctattggattgtcgggaggagtaaaaactctgattcttgtaaagttcgataaagacaaagtttttaacgtttccacctgtggggataactgtgcaaaatggctgctgaggattgcagaatcagaagatcggacagtgaatcttctgcatctgatggattttgggaaagaatcatttgctgtacgtgtgttgaatacagatcagattgtgcactcaatggaagaactggtatcaatagccggagagtttgtttgacgggggtaatataatgaaaggaaagcacagaatcattgtttctaccaaacgattaaaatatgattttgaactgagaaggaatctgacaatcatccggggcgacagcgcaacaggaaaaactacattggtagatatgattcgagaatatgtaaataatccgtctggtacgccggtagagctggtatgtgacaagaaatgttatgtgctggaaggctctttatggaaggggcagttgggcgagatctctgacagtattgtatttatagatgaaggaaatgaatttattcgaactgaggaatttgcgggaacgatacagaagacagataattattatgtgatcgtatccagagaatcactgccaactttaccttatagtgtagaagaaatttatggaattcgtacatcgggaaagtatggaactttaaagcagatttatcatgaattttatcgtttatatgggacgaatgcttatcaaagagagataatgcctgaagtgattattacagaagacagtaattccggatatcagttttttaaacaaatatgtagagagaatcagttggaatgcgaaaccatgaatggaaagtcaaacatattccattatctgaatgctcataaggatgaaaaaatacttgtgatagcagatggtgcagcatttggctcggagatggacagagttcagaaactaatttcagaccgaaaaaatatggcactttatttgccggaatcttttgaatggctgatactgtcttccggtattttgaaaaaaagtactgtaatggcagtcttgcatacaccgtatgattatgtggaaagtgagaagtattttagttgggaaagattttttacagcaatacttattaacgaaacgaaagatacttatctggcatatttaaaaagaaaactcaatccggtatatctgaatgactcagcaaaagaagcaattctttcacagatgactaaaatcagactggactggaagataaatgatcaataaaggaaaaggggactgttgcatgcagtctcttcttttgtaataaaagataaaaaaacagttgactctgacccagcgtaatagtttattctgtaatcaccacacaggaggaacagaaagatgatgacagtaaatgaggtaagccgtctgaccggtgtaagtatccgtactttacagtattatgacaaaataggactgttaaagcccacagaatatacaacggcaggatacaggctgtatgacaatcgcgcgctggaaaaattacagcagatcctgttatttcgtgaactggaattttcgcttaaggacattaaacagattatggatgctcccggttttgacagacagaaggccctggagcagcagattgaggttcttatattgaaaaagcagcgtcttgaaaatctgatcgctcttgcctgtggaataaagaagaatggagaaagaaatatggatttttcagcatttgacaccactaaaatacaggagtataaaaaagaggcaaaagcagcctggggaaaaacagcggaatatcaggaatatgagcagaaaacaaaggacagaaacgcagggggatatcagactgcgatgatgcagatgatggacatatttacagaatttggagaaattcgtacgggagagcctgattctgcccaggcacagcagcttgtgaaaaaacttcagcgctgtatcacagataattattatacctgttcggataaagtgcttgctgaacttggcagaatgtatgtggaagataaaagatttacagaaaatattgataaggcaggaggctgcggaacagcagaatttgttcataaggccatagaatgttactgtggggaataaatccagttagttatatccggcaatccttcagttattgtcacaaatacggagaaaactgctgagttggacttgaatgttataaacagttaaaaatggatggcggttagtctttgaaaggctgaccgctgtttgttttggagaatacacttaaaaaacagaaattatctgtatacatgcccgaaaaaaagttttatactggaaagataaacaggatctgtgtacagacagataaacggaatacacagatttataagcaaaggtgatgtaatactgtggcagaaaagcagaaaacaggcagggcagagctttattcccttctccttctggcaggcggaaaaagcagccgcatgggagaggataaggcagaacttcttctggatggagatagttttctttcctgtcagataaaaaaagccgagaagttgggaatccataaggtttatgtttccgttcacgctgcaggagcggatgctttccggaatggaacagtaaaaagcagcatacatattcaaatggttcctgatatttaccgggaacgggggcctttaggcgggctccatgcctgtatgaaggcaatggacacaccctattgtctggtgcttccggtggatgtgcctcagtttccggaggaaacgctggaggagctgcttcttgctcatgagaacagcttaggcgcagctgcttctgaaaatgccggaagctttgggaatggcagagagggtggcaattccgggaaacctcttctgcttgttcacggagaacggacagagcctttgatggggatttatcccgtctgcatggctgattgtattggagaacagatagagaaggcttctgctccggtgtttcgggttcttgatgcatggggattcgataccttccggacatccgcagaggagtggaagatgagaaatatcaatactccggaagattatagggagcttttagcatacatggaaaaggggaaggtgaaatgattgagggaattttgctggaaaatgccctggaggaaattctgaaacgggcagacaggattacagatacaaaaaaagtaaaggtggaggaagccaatggattttgtcttgcagagaatatttatgcagagctggacaatcctccgtttccaagatcaccggtagacgggtatgcggtgcgctctgaggatatccggggagcggtcaggggaaatcctgcggttctgaaggtggcaggctgcatttatgcaggagataatggaggggctttttccataaaaccaggagaagcataccggatcatgacaggagctccttttccggaaggggcagatactgcggtaaagcaggaggatacagactgcggggaagaaactgtaaaagttaataaaagtcagaagccatgggacaattattgctttcagggcgaagattataaaaagaattcgcttcttctggcaaaaggttccagaattacttttgcagagcaggggatcctgtccggtatcgggcgtacagaggtggctgtttaccggaaaccggtgatccgcgtgcttaccacaggagatgaactctgccagccgggaaatcctctgaaaccgggaaaaatctatgattccaatgggatgatggtttcttcccggcttcgtgagcttggagtgaagccggaatcagtgtctcattgtgcagacagtgaggcaggtctggcagcagaactgaaaaaagcggcagaggatgcggatatcattgttaccaccggcggtgtctctgtaggaaaaaaagatattcttcacggagccctggaaatccttggagcagaaaaaatattctggaggatccggcttcagcccgggacccctactattttttccgtatacgggaaaactctgatcctttccctgtccggaaatccctttggtgccatggcaaatctggaactgcttttgcgtcctgcgctggaagccatgaccggagatcctgcctttgctatggaaatgagaagagggatcatggaagtggactttgaaaaaagatgtaaagtccgcaggtttgtgagggctgtgtataagaatgggaaggtttcttttccacaggggattttttcttcaggcgcaatcggaactttgcggggctgcaactgccttctggatatcccggcgggcagggaaaatgtaaaagccggagagcaggtggctgtatggatgctgtaaaaagaacgggaaaaccttttattgcagcagtcagcggagtaaaaaattccggcaagactacttttatggaaaagctgatttccgaacttgccggacagggataccgggtggctgtgatcaagcatgacggtcatgaatttcaggcggaccgggagggaacggacacttaccggatgcgtcaggcaggcgcttacggaacctgtattttttcctccggacagtggcaggtggtgaaacagcagcaggatgtccgggcggaggagctggcagaattttttccggaggcggatattattcttctggaggggatgaaggattctgattatcccaagtttgagctggtgagaggagaaatttcccataaaagtgtctgcaggccggatactttactgggacttgtgacagacacagagcttaaaattccgggagttccggtgtttggtttccatgaaacagagaaatgcacagaaattctgataaaaatagttcaaactaacaaagattaaggttaaagaaaaaagaatttggctgttttgtacaaaaaatagagctggattcttgtaaataaaaattaacaatgttaaaatataaacgaagattcatcagcttttgcatatgaaaatgcagaagcagttatctcagggataacagacatcatatatttttatgttaggagggaacaagtatggctttaaaacaagtccagacaacctgcgcgtattgcggagcaggctgccagattatgttcacagtcgatacagatgcaaacaagattgtggaagcagtccctgcagacggaagaaccaatgcgggaaccctctgtctgaaaggtcattacggctgggattatcttaatgatccccagattcttacgaaacgtcttcgtaaaccgatgatccgtaaaggcggaaaaaaatcaccccttgtagaggtttcctgggaggaagcaatttcctatgtagcgaaacgtcttggggaaatcaaagaaaaattcggtccggattccattatgggaacaggctctgccagaggagcaggaaacgaggccaattatctgatgcagaaatttatgcgcgcgtgcatcggcaccaacaacgtcgatcactgcgcccgaatatgacatgcgccttcggtagcgggtctactgtattctttaggttcaggcgcaatgtcaatgggcatcccggagatcgaggatgcaggctgtttactttgcttcggctataacggagcagattcccaccctattgtggcaagacgtattgtaaggggaaaacaaaagggaatgaagatcatctgtgcagatccccgcgtgacggagaccgcacgtatttcagatattcatctgcagcttaagggcggttctaaccttgctcttgtaaatgccatggcaaatgtgatctggaatgaaggtcttgcagataaaaagtttattgatgaacacacgaagggatttgacgaattcctgaaagtaatagaaaaatacactccggaatatgcagagcctattacgcatattccggcagaaaccattcgcagggcggcaagagtgtacgcaaccaccaaaccggccatgattctttatggtatgggagtctgtcagtttacacaggcagtagacgttgtgaagggacttgccaaccttgcgctgatgaccggaaacttcggcggcccgtccatgggcatcggtccggtccgcggacagaacaacgtgcagggagcctgcgacatgggagctcttccaaactcctatccgggctatcagaatgtaaccgttccggaaatccgcgaaaaatttgaaaaagcatggggcgttcctctttctgatcaggttggctgcccgatcactcatgtgcctcacagaatccttcatgagaaggaagaaaagaagagaatccacgcatactacatattcggagaagatccggctcagtccgatcctgaccttgcagaggtccgcgaggctctggacaaatgtgattttgtggtaatgcaggatatctatatgaataagaccgggctttatgcggatgtaatccttccggctactgcctggggtgaaaacgaaggtatttatacctgtgcggaccgtggcttccagagagtgcgcaagctgatcgagccggaaggagatatgcgtccggactggcagatcattgcagatatttccacagccatgggatatccaatgaattacaaaaatacagaagagatctggaatgaaatgatcgacctctgtccaagctttacaggcgctacttacgaaaaaattgaaaaatacggcggcgttcagtggccctgccgggacaaatccatggaggataagggaacaccgtatctccataaggacggaatttttgcaacaaaggatcataaggctctgttttacggcactgactggcatccgccggtagagctggaaaacgaccagtatccaatgactctttccactgtccgcgaagtaggtcattattctgtgcgtactatgacaggaaactgccgtactctccgtaatctggaggatgaaccgggatgggttcagatgaatacagaggactgcgagaaaatgaacctgaaaaagggcgagcttgtgaagatcctttccaagagaggctactgtattacacggtgtcttcctacggaccgtgtaaaaccgggtgcaacctacatgacctaccagtggtggatcggagcctgcaatgagctgacaacagccaagcttgatcccatcagcaatacgcccgagtacaaatactgtgcctgccgtgtagaaaagatcgaagaccagcagtgggcggagcgccatgttatggagctgtatgacgatatccgtgcgcagatgggcattgatacaggaaagggggcaaaagcatgaattactttgtgaaaggaaaccctgacctttgtatcggctgccgtacctgcatgatcggctgtgtggttgcccatgagggaaagcatatctttgaggtggatccggattcctacagctttaatccgaagcttcatatggtaaaaacagcgaatttaagtgttccggtgcagtgcaagcattgtgaaaatcctgcctgtatggcagtgtgtccggttggggctatttcccagaaggatcactgtattgtcattgatacagaaaaatgcatgggctgtaaatcctgtatggatgcctgtcctttcggcgctatcaatatgacagtccagaccggaaaattccaggcagacggaacagagaaaaaagtggcaaataaatgtgatctctgttacggattttccggaggcccggcttgcgtgagagtctgtcctacagaagctctgactcttgtgacagaggatgagcttggagacgccatggagcgtaagagagcagaagcggcaagaaacgcatatctggaaacgcacccacaggaataggaggacatagaaatgaaaaaagaaatcggatcctttgtggtgggcgacagtacaaaatgcacaggctgcaaggcctgtgagcttgcctgcttcaccgttcataaccgtaagagcaatcaccttggaaaaacagtgggaaccgtaacggttcccgtaactccaagactgtttcttacaaaatttgagcagggctgtatgcccatccagtgtaagcactgtgaggatgctccctgcctgaatgcctgtacaaaaggcgcgatcagccgcattgaccatcaggtgatcgtggatgcggaaaaatgtatcggatgtaaagactgtatgcaggcctgtccttttggggcgatcgcccttcttccttatgccagggacggacgtctggtgggccaggcaatgtcttcggaaccaaaggtttttgcatccaaatgtgatctctgcgagggaattgagggaggtccggcctgtgtccgtgtctgtcctcatcaggcgctccgtctggtagatcctgaggcagaaagagaagaaaaaaatatcagggcggcagaggctctgcttctgacaaaaaactggagataagggaggacaaaattcatgatagtagcaattgatcagaatatctgtaccggctgccgtgaatgcgcagaggtctgtcctgcctatgccattgtgggagagcagggaaaaccgcagaccattgatacagacagatgcgtgatgtgcggtcagtgcgtgcagaaatgtaaatcctatgtttctgtactgacccatggaaaagacgcatacgaaagagtaaaaaaagaaagaaatattccggattccgttcaggagccgctttttgcagctcatgcagtctgccacctgaacgaggtgaaggcagctcttgcagacaaaaacagattcaccattgtgcagtgtgctccggcagtgcgggttgccattgcagaggaatttggcgcagagcttggaacccttactccgggaaaattatccgcagctcttcatgctcttggctttgaccgggtatacgataccaacttcccggcggacgtaactattatggaagagggaacagagcttgtaaaacgtgtgacagagggaggcgttcttcctatgtttacttcctgctgtccggcctgggtaaaattcctggaggataattatccggagcttaaagatcatttatcttccgcgaaaagtccacagcagatcggaggagcgatttttaaaacttacggagcgcagctggaaggcagagaaggtaaggatatttacagcgtttctgtaatgccatgtacctgcaaggagtttgaaagcgaacgtccggaaatgaaagacagtggattccgtgatgtagatgctgccattacaacaagagatctggcatggcttattaaggatatgggaattgactgggaggctcttgatgagcaggagtttgaccagcctcttggtctttatacaggcgcgggaactattttcggcgttaccggcggcgttatggaggcagccattcgtaccggttatgagcttgtgaccggacagccgatcccggatctggaagtgacagcagtccgcggtacagagggcttccgcacttctgtgataaaagtgggagacctggatctgaaagttggtgttgtcacaggactgaaaaatgtggttcctgtgctggaagcagtaaagaacggtacgctggatcttcattttattgaagtgatgacctgcccggagggctgtgtcagcggaggcggacagcccaagcttcttatggatacagacagagaagaggcctatgcggcaagaagagctgcgacctttgcccatgacagagaactggcctaccggaaatctcacgaaaatcctgcgatcaaaaagatttacgaagaattcctggaagagcccaacagccatattgcgcaccatcttcttcatacaacctactgtaataaataaagcataaaaataaaaaggtatttccagacattgtttcagtttggaaataccttttttgtgcggcttgctgttaagagctgaggtaaaatgttctgctcctgtccggaaagccaggaggactttttatctgttcagatattcgtttacagcccttttgccttcataaacagccttttcctcgtcaattccagtaagctttccgtttctgacaacaattttcccatttacaacagtataatctacagcgcccttaaatcctacggttcccagcatggattttggatccaggtctgcgcctacaagctccagacggtttttccgtataaggaaaagatcgcctgctttacccggctccagtgaaccgatgtcgctgcggccaagaacagcagcgcttcccctggtggcaagcttcagcagctcatagccgtcaggagcctggctgctggaattcagcctgtgaagaagataggcgacacggagctcttccagaagattggagccgtcattgctggcgcttccgtcaactgccagtcccacggggattctaagcttcagcatttccgggatacggcagatcccggaggaaagcttcatgttggaaatggggcagtgagccactcctgtttttgtttccgcaaggattttaagctcttcatcattaaaatggatgccatgtgcataccatacgtcgctgcctgtccagccaagctcttccatgtaggaaagaggacgctttccgtatttttccagaacatagttttcttcgtccagtgtttcgcacagatgggtgtgaaggcggactctcagatctctggcaagaagagcagactgccggtacagctctttccctgcgctgaaaggcgagcagggagccagggcaaccatattcatggaaaaaggcgccggattgtggaacttttccacagcgtttctggaatctttcaggatttcgtctactgactgaaccacactgtcagggggaaggcctccgtcctttttactgagatccatacttcccctggatgcatacatgcggattccaagctgccgcgccgcctcaaactgagcttccagaagagagacagaactgccgcccgggaagacataatgatggtcaaaacaggtagtacagcctgtttttaataattcccccatacccgtaacggaactgtgataaataatagaactgtcaaggtttttccagatttcataaagtgtggtcagccattcaaacagttccatattctgtacctgaggcagattacggctgaaagtctgataaaggtggtgatgggtgttgataagtcccggataaaccatacatccggaagcatccagaatttcatctgcggaaaaagtctgctgtccgatgcttcggataaccccgtcttcgatcagaatactggaattttccagaaccgaatcctgatcatcacaggttacaataacagaagcatttttaatacataagctgctcataatatgatcctcctattttctgaataaaaaagccctaacagcagacaggggatttccggttttgcggaaacctgtagtcaactgttaaggcagttggtagaaacgctcgtcccattacgaacttatacaagctattatataatgatattaccgttttagggacgaaaggtcaagatgtaatattttttctgcttttatctcaaaggcagtttcatcgcgtttcaaatattttctgggaatatccttttctgttacagtcatgccaagagtttccatgattttcatggatgcagagtttctgctgtcacagcaggcagtgactttattaagatgaagtgtgttttgacaaaaactgagaagagcctgcgcagcttctgaggcatatcctttattgcagtaatctctgtgaatgatccatccaagttctccgattgtaaaagcttcatcttcagcgtagacagaaacctcgccaatatgtcggctgttctgtatgacagcaaatacataacagcggggaaattctttactccattcttggcaggtctgtatgagaaactttttgcacacttccatagattcatctggatagtatttcatatatttcacatgctctccatcggaagaataagcataaacagtggaaagatcatctggactgactggccggagaagcagacgactggtttgcaggcgaatgttttcgtacatgggaggtcacctctttctgtggataaaaaatgaaattgttgtttgattatagtttaccataactgtagtattgcggacagaattttataaaaaatcagcgaaaaagaaagaaaattaaaaactgcttttttgaaatgcgttgacgttaaaaaaatcggacgatataataaaaaagtacagcttatggatacaaatacatgaaaggaattagagggtggaatccttgctgtttttaataaccaggcgcttcggattgtattatacggttcttatgcaagagaaacctatacttctgaatcagacgtggatattgctgttctgctaaatggaaatctgaatgaaagtacagaagacaggttggcggatctggttgtggatttaaacttaaaatatgataagacattttctgtattgatattaatatgagatttttaaaaatgggaaaagatttacggcacagtattgaaatgagaaaagttatggattctaagtaaaggaagtgattttgatatcaataaaattaataaaaggaagttacgaatacaaaggacagattattgacatgctcaaggagtggaaaaaatataatgatacttatgatgtgaaccgttcaccagaagttattttcaaaaacgattatgatgactttgattactatctggataatttggaagcaaaggaaccaaaagacggactggttcctcattccacattcttttgtttggatgagaggcgaaatatcattgtaggtgcagtaaatatcaggcattatttaaatgaacatttgctattacatggagggcatattggtgacggaatcagaccatctgaaagaagaaaaggatatgctgtacaaatgattgggcttgccttagaggaatgtaaaaaaatgggaatcaaaaaagttttaatggtatgcgataaagataatattggttctgcgaaatccatcataaaaaacggcggaatattagaaaatgaacaaatagaaaacggtaagacagagcaaagatactggattgatttagagtaatcggataaatatgaaagtcaaggggaaaaacctcgcagctgttaagaaatatgatgagaggaattttggcggcaatacatatgaatatgcgatgatgttgtgcctggatgcggtagtgaagatgtgatagaaaaaacaggcagatgatttaaagagaagacgaaggagagaatttttatgggatttcttaagaaacatttttcaatgtacagccatttgccaaaagaaatctatgtgctggcttttggcaaagtcatgacaagtatgggggcgttaatatggcccatgcttaccttgatcatgagtgaaaagctggggttgaacggacagaccatcggcctgtatatgatgatattttctttgtttatgggaccgttttatttactgggaggtaagctggctgacaaatataataaaaagcatatcatcgttaccttcgacttgatcggaaacagcctgtattttgtctgcgctgcattgccaatgtccatgacgacactgtatttactggcgattgcttctttatttcaggcaatggagcagccggcttacgatgctctgatcgcggatctgacaacctacagggatcgggaacgagcatattcgctgaattatctttccatgaatttaggcctggttttggcgcccaccattggaggcattttatttaatcattatctcagcctttctttttttattaacggcgtggcagatatcaccagtacgcttcttctgctgatttttattaaaaatataagaactgctgaccgggataacagaacagtgaacgaatatgaaaaaggagaaacaggatcaatattcaaggttttttcgcaacgaaaattattttttgtgctgtttgtcattcacggtatagctgcgctgatttataatcagttcagttttttgatgcccttacatatggaggaagcctttcagggatcaggagcttttaaatttggagttttaacaagtattaatgcagttgttgtggtaataggtacgccaatattaacccaaaagctttccggatttatggatatcaggattatgtatttggggcagctgctggagtcattaggacttgcattttttatttttgtaaatcatcattttgtgattgcggttgcagggattattatatttacaataggtgaaatattgggttccatttcaaaaacgccttatcttacaaaaagaataccggaaacacatcgtggaagagtattaagtattacgaccagctgcgccggattaattggagtattaagtaactacataataggaacacttatcgactattatacattcagtactgtatggataattatagcggtgatcggtttatttgtgatgattctgtatagtatttatttaaggctggataaaaaggcttattccggcctttatacaaaataaaagtgttacttgttcagaggcattattctacctgatacggagaagcgtttctgtagtaaaaaaaacagacgtgtggtatgataaggaagaatataaggcgataaagtatatttgctgcacagatacaggtctggtttgttatagaggagtgtaggagtgaaaagaaatgtgaaagtggtatccggattgaatggaaagaagattgtacagatgcaggatattctttttgcaggaaaaaaatccatcaactggaatgaggtaaaagtttaccttgaatcttatgtaggcaatttttacgaagttatggatacaaaagatatcgtatacattgggaaagattttccagatgaatatacggggtcaaaatatacttatatgctaaaaggggcaaatgcaaaagtaaaggccaatgcagtacagggaattccagaattgctagaaattgcctcaggaaaacattatcgagaaaatacaggagagaaacatctgagagatgcagcaaatggatggtatcgatatgattcgtactttgcattgccagtttatgatgcagagggagaagtggaacggtataatgtgtttcatgcatctatgctgatacggcatgcaaatgaccgaaaaatgtatttatatgatattctggacataaaaaaagaaacgagcaaccctttcaaatcacaagattttacttggtaaaaacccatttcttattttcagtatagggtaagcccaggggattgtcaaggagaaaatgatgttttatccctgacaatctgaaaggaaatttgtctcgtgttgtggacaataacaatatatgaagccggacaggttttcctctccggtttttacaggggttaaactgatgaaatatggaattataggaacggcaggtcatgtggatcacggaaaaacctgcctgatccgggcattgacgggtattgatacagaccgtctgaaggaagaaaaaaaacggggcattaccattgagcttggttttgcctggatggatttcccaaaaggggagcgggtagggatcgtggatgtgcccggccatgaaaaatttgtaaaaaatatgctggcaggtgtggctggaatggatatggtcatgcttgtggttgcagcggatgagggaattatgcctcagacagtggagcatctggacattttgtccattctgggggtacgctgcggagtgattgtgatcacaaaaacagacgcggcagatccggagcttacagagctggtggaggaggacgtcagggaactggttaagggaacgttcctggaggatgcgcccgtagttccggtttctgtatacaggaatcagggaatcgacaggcttcgggatacgctgtatcagttatacagagatcttccggggcataaggaaacccgggccttccgcctgcctgttgaccgcgtatttacattgaaaggctttggaactgtagtaacaggaacgctttttggcggaaggatcaaaaaggagcaggaagcgtatctttatccggaaaatacttctgtaaaaatccgcagcattcaggtgcatgagacaaatgtggaggaggcacatgctgggcagagggtggctctgaatcttcctgacaggaaaaaacaggagatccgaagaggcgatgtggttgcccttaaaaacagtatgtatcctaccatgatggcagatgtgtctctgactgtgctgcgtcacacacagcgcagcgtaaagaacggaagccgggtgcatgtgtatcatggtacaagggagcttctgggaaaggtgatcctgcttgacagagatgagctgaaagcaggggagacctgttatgctcagctcaggctggaagaggaaacggttctggaaaaaggagagcggtttgtgatccggttttattccccggcagaaaccattggaggcggaacggttctggatatctgccccagaaagcataaaagaaatgaccaaaaggcgctggaggcctgccggatcaaggaaagcggaaccagggaggaaatgcttgaactttcagcctgggagcactggggaagcttttttactttggaggagctggcaggacgaagcgctcttgataaatccgggctgaaacatacagcggagaagctggcggagcgaaaaattctggtgcgtcttaatgaaaatctgtacattcacaggcaggaaatggatttttaccggaaaagggcagaggcagttctggatgaatttcataaagccaatcctttaaaggaaggcatgggaattgaagaactgcgaagcaggatgaagcttgcagacgggaagcttgcagacgatattcttgccgttttaaagaccgaaaaagtaatcaaggaagagcacggactgatcagtaaaaagcgttttcgggtagttctgaaggaggatgaggacgctatggtaaaagaaatccttaaccattatctggatgagggctttgcgcctcttgctaccgagctttatctgaaggaacaccggaatcagaagaagtttccggctgtgtttacgtcccttctgaacaaaaaagcgctgatccggctggatgttcaatactgtgttcaccgtgattactatgagaaggcaaaaacagctttccgggaaatggcagagaagaagccggaagttgctcttggagaataccgggattatctgggctgttcccggaaggtggcggtagcccttttggagcattttgataaaaacggttttacaagaaaaacagagggcggaagggttctgaaagcctctggaaaataaaggttatgggaaatgaagaaggctttaaaggaaaagatgacaggaaattatgtaatggaggtgagtgatatggcagacacagaaattcgtttgacgcagatgtcaactacctccggctgagcggcgaaaaaaggtccgaagacccttgcccaagttttgggtaagctgccaaaatttaatgatcccatgcttttagtgggaacagaaaccgcggatgatgccgcagtttatcagatcagtgaggaactggcaatgatccagaccgttgatttttttaccccggtggtagacgatccctatctgtttgggcagatcgcagcagcaaatgctttaagcgacgtatacgccatgggcggagaacctaaggtggcgctgaatctggcggcctttccggactgtctggatattgagatactgggaaaaatccttcagggcggcgcggataaggtaatggaagcaggagctgtgcttgcaggaggtcataccatttccgacaatgaaccaaagtacgggctttgcgtcagcggttttgttgatccgaaagccatgtggaaaaattatggagcgcagccgggagatgtgctgatccttaccaagcctctgggtaccggaattatttccactgccattaagggagagcttgcctcagaggaagagataagctctgcagtaaaaacaatgactgccttaaataaatatgccagggatattgcggtgggatttgaaatccacagctgtacagatatcaccggcttcgggctggcaggccacgctatggaaatggcaaagggcagtgaaatgacgctggttctccatacagagaagcttccggttttgcccggagtaaaggaatatgcccggatgggactgattcctgcgggagcatacagaaaccgggaatatctggaagaggatgttttcagtgaaattgcaggaacctggcaggaagatcttgtgtatgatccccagacgtcaggagggcttcttcttgcagtaaaaaaagaagatgccgctgagcttctggaacgtctggctgatcttggttctccgggcacagccgtgggagaagtaaccggaaaacaggaaaaatatctgatattaaaataagcggacagtatatgaataaaaatgagattttaagacagcttccgaagatggatcggatccttcaggagccggaggcggaagagctgtgcagactatatggaaaaaacaggatccttggtatactccggcaagagctggacagtctgagaaaggagcttctggaagggaaagcaacagaagctgctgttgaaaatgctcagccaacagagctttttatttcccggctgctccaacaggctagggagaggacaaaggcgctggaagaaccctcttatagacgggtttttaacgcaacaggaattcttcttcatacgaatcttggacgggcgcctcttggaaaacgtcagatggaggccgcctttcagtccatgtgcggattttctaatctggaatacaggctttcggaaggaaaaagaggaaagcggcaggctcactatgcagatatgatctgccagatcaccggtgcggaggctgcggtggcagtgaacaataacgcagcggcagtgactttaattcttgcgactatggcgcacaaaaaagaagtgattgtttccagaggagagctgattgagatcggaggacatttccgtatcccggaggttatggagcagagcggcgccttccttcgggaaaccggctgcacaaaccggaccaggatttcagattatgaacaggcagtaacagaagaaactgcggcatttctgaaggtccatacaagcaattataaaattgtgggatttacggaggaaacctctgtggaggagctttctgctctgggaaaaaaacacgggattcctgtgatcgttgatctgggaagcggggttctggttgatctggaaaaatacgggcttgcccatgagcctacagtaggcgaaatcctccgaaaaggagcggatgtggtctgcttttccggggataagcttctgggcggccctcaggccgggattattgtgggaaaaaaggaatacatacaaaaaatggagcagcatcctctgatgcgggcgctgcgccttgacaaatgcacaactgcggttctggaagctactttccgggagtatttttgtgagaaacaggcatgggagaacattccggttcttaaaatgattgcaagaaccaaagatgagcttcttgcccaggcagaagaaatttcctgggaactgaattcctgctcctgttccggaaaaattgcagtaacagagagcagcgctgtgattggtggaggctctcttccgggagaaacaatgccggattatgcagtggaaatttttccggaaaaagaaactgcacagcagctggcagaccgtcttcgtctgcttcctgttccgattgtttctcatataaaaaacgacagggttttgctggaaatgcggacgatttcagaggaagagaaacgggaatttacagcagaactgaaagaagtgcttgatgaaaaataaattttttttgcagaagctgacggatgagcttttaaggagaaaaaaacggctgtggaaattaattccgcagcctcattatattctggcggatgcctgtgagaatcgaactcacccagggcgctcttaacgtccagcacaggttttgaagaccagggggcacaccagttacccaacgacacccaaaaatcttttttattatagcagtgtgagagatatttttcaagacattacggcttactttgtttacagcagactggttaaaatgccttccagatcatcttcggtgatggccttctgtcctgtatgtctcgggatagccgcctgtgaacagtaaaatccaaagtgcgcaggaaagcatttttgatgagggtgatttgccttgcatatctcagtataataggatatataaatgctaaaacaacttgtgggacagtgatctgtggatgataacttcataattaaggacttcgggagagaaaagcttatgaaaaaaacattgataaatataaaaaaaataaaaaacagacaggaaattttctgtgaagatacggtagcgctggaaacggaatacagcctttttgtaaacggtcagaagctggtcagattaagctgtacgccggaagatcttaaggaactggccctggggcggctgtatacagaaggtctggtaagaaatatcaggcagatcagaagcattcagattcaggaagaagaacggacaatttatgttgagatttctgaaaacgagaagcagaggacagagaaagaatcggggaagaatacaaaaaatgaagtggagagttctatagaatccagggaaaaagagccgggtaaaacagagccgatacagtatcgaaatgcagaaactacgatgccggagaggaaacaacggtcagaggggaatagaattgtcggtttttctgagatcttctccgcggcagaggtttttttctctcagccgggagaactgttccgggaaaccggctgcgctcattcctgtgcgttctggaaagaaagggagatagtctgcagctttgaggacattggccgtcataatgctcttgacaaggtggcgggaaagcttctgattcaggaaatcgatcccggagacggtgtgatttttacaagcggaagaatatctgcagactatctcaaaaaaatcatccagatgggagttgcaactgtagtttcccgggctgctgtcacagaggcggcagttcttctggcagaaaagtatgggattctgttactgggatttgtaaggaactacaccggaaatctttatgcagggcagttataacctcttttatttccagatcacattggcctcttttctgggggctgtccgttcataggaaacattgggatagccaaggagcatacaggctttgatagtttttccttttatgccaagccagtccttaagcttttcgtttgcattggtaatgcgggcaagatagccgttatacagtgtgccaagccccagagctacagccataagctccatattctgggcggcaagtccggcgtcaaggggccagtcggaggtaatgtacgccactacaggagcattgcggaacagataatcgtctttgcagttggcttttctgcgctgattgaaagaaagatagggaagcatatctgctgaggcgttatcgctgtgggaggcggcgtagtcgtcgataaaatcccagacctgctgtttgagcgcagcaagttctttttgtacaaaaataaaatgacagtcctggttgtttttggcagtggcagtgtagcggcctgcctgaaggactttctgaagtgtctccttttctacgggaaggggcttataatcccggatgcttctgcggaatttgatggtgcgcagcagggtgtccggttccagagagaaagaattttcattatatatttccacatcattcatatcgtagccgggaattgaaatcgcttctttggggcagagggcagcacagtgaccgcagttcatgcagtcgccagatgccgaggccttgtggtcagtgatggaaatgcagaaaacagggcagtccttaacgcattttccgcatccgatgcatagttctttgttgatctggatcatggtatcctccttgttctgatgagatttgttgaaatggctataagtgttgcattgtaaatttatatccgtattatacgctgtctggataatggattcaacaggattgtagcaggcgtgaacagcagataaccggaaaggggggctggcggggtgtacggtaaaacactcagaaagctgttttttggggggcgcagggcagatgaagggaatcatacacaaacaggctcagcaaattatgttgagagaaccacaaaataatgatataatatgaacacttaatgaatccaagccgaaggcgcaggatgaatttagtgagaatttatacctggacacttagcgaggacaagcaaagcgcaggcagaggttagtgaccatggtattaccgaaacacttaatgaatccaagccgaaggcgcaggatgaatttagtgagaatttatacctggacacttagcgaggacaagcaaagcgcaggcagaggttagtgaccatggtattaccgaaacacttaatgaatccaagccgaaggcttcaattcataggcgcaggcggggggcctggcttatgtaaaagcaggaaaggacaagggtggcaaaagatgaactatgaagatgtacaaaaggtatcaaacgcggcagcggcaaaatcacagcttgtaaacaccggcttcggcaaatattttacaagagctgtgatggcaggattttttattgttcttgccatgattttttcaaatgtagtgggcaatgtattttccggggcagagcttcctgcctggggcaaatttttcagtgcggtggtgttttccattgcagttcttctgatttctatggtaggcggcgagctgtttaccggaaacaattttgttatggctttcggcgccattgacaaaaaagtaacctggaaagaaaccggtaaggtatggctggtaagctatatcggcaattttgtgggctgtctgatcctgactctgatctttgtatgggcaggcgcagcaggaaccaaagattattttgccggctttatcaacaataaactttcaattccgctgggagaaatgttcttccgggctgttctctgtaacttcttcgtatgtcttggcgttctttgcggcatcaagctgaaaagtgaggcggcaaaaatcctgatgatcatcatgtgtatttcaggatttgtgatcagtggatttgaacacagcattgcgaatatgagtacttttgtggctgcatattgtctggttccgggactttccgtaaccgccatgctgaaaagtatgctggtagtcacagttggaaatatggtaggcggcgcggttcttcttgcctggccgctgagaaagatgagtgcagatcaataatgggaaaagctttatacatagcagaaaagccaagcgtggcgcaggagtttgcaaaagctcttaaaatcaacggacaaagaagggacggctatctggaatcagaggattctgtagtgacctggtgcgtagggcatctggtcactatgagctacccggaaaaatatgatatcaagtacaaaaggtggagtctcgataccctgccttttttaccgcgcgattttaaatatgaaatcattccggcagtgcagaaacagtttaatattgtcaggggccttctgaaccgcccggatgtggatactatttatgtgtgcacagactccgggcgcgagggtgagtatatctatcgtcttgtggctcagatggcgggggtccatgataagactcagaagcgtgtgtggatcgattctcagacagaagaagagattttaagaggaatccgggaggcaaaggatatctcagagtatgataatctttctgcatctgcttatctccgggcaaaggaggactaccttatgggaattaatttttcccgtgttctgaccctgagatatggaaacagtgtgtccaactatctgaaaacaaaatatcaggctatttccgtgggtcgtgtaatgacctgtgttcttggaatggttgtacgaagagagcgggaaatccgttcctttgtaaaaacaccgttttaccgggttcttggcagtatttcccttgagggcgaaaactttgacggcgagtggcgggctgtggagggcagcaggtattttcggtctccgtatctttataaggaaaacggttttaaagaaaaacagtacgcagagaagctgatcggagaactcagtcagaattctccgcttgtctgtcaggtagaaaaaatcgagaggaaaaaagaaaacaagaatccgccgcttctttttaacctggcggagcttcagaacgtctgctccaggctttttaagatcagtccggatgaaaccctgaggatcgttcaggagctttatgagaaaaagctggtgacctatcccagaacagatgcccgggtgctttccactgcggttgcaaaagaaatttacaaaaacatttccggccttcgcagatatcctcagatcgacggggcggcagatgaggttctggaaatgggaacctacaaaaatattgcaaaaacaagatatgtcaatgacaagcagattacagatcattatgccattattcccacaggtcagggactgagtgcattgaatgggatttccctgacggttcagagggtgtatgagacgattgtgcggcggtttttatgcattttttatcctcctgcagtttatcagaaggtaaatctggtaacggttatggaaaaagaacactttttttcctcgttccgtgtccttcagagcgagggatatctgaagatcgcagccaattcctttgcggcaaaaaaagcctcggaaaagtcccaggattccgaggaagaggaaaacacctcctgcaacgaggtacttctggcagcattgcagaagctgaaaaagaatgatatactttccgtagattctctgagcatcaaggaaggagaaacctctccgcccaagcgctacaattccggttctatgattcttgccatggaaaatgccggtcagctgatcgaggatgaagaactgagagcacagatccggggaagcgggatcggaaccagcgccaccagagcggaaatcctgaaaaaactgttttctattaaatatctttccctgaataaaaagacccaggtgatcacgcctacacttttgggagaaatgatcttcgatgtggtgaactgttccatacggcagcttctgaatcctgagcttacagcaagctgggaaaaggggcttacctatgtggcagagggaagcattacccctcaggagtatatggataagctggagcattttgtgcgggtacggactgttcaggtggaacagagcaattaccagtatgcgctgaggcagttttttgatgcggcggcagagaattataaaaagaagccttcagcttcgaaacgaggaggaaaagaattatgatgaaagattttaccattgagaagcttcttgatctgaaggaaacaatggctgcagagctttttgagggaaaaacgtatccctgggaagtacttcctgagattaaagattttatcctgaagcttggcaaaacactggatccggatgagtacgagtaccgggagggcgatatctggattgcaaaatctgcaaagatcgctcctactgcctgcattaacgggcctgcgatcatcggtaaggatacagaggttcgtcactgcgcgtttatccggggaaatgccattgtaggagaggactgcgtggtaggaaactctacagagcttaaaaatgtggtcctttttaactgcgtgcaggttcctcattataattatgcgggagatgcagttcttggatacaaatcccatatgggagcaggttctatctgttccaatgtaaaatccgacaaacagctggttgttgtaaaggatggagaggaaaaaatcgagaccggattaaaaaaattcggcgccatgctgggagatcatgtggaggtaggctgcggatctgtcctgaatccgggaactgtgatcggcagaaacagtaatatttatcctctttctccggtaagagggtgtgtgcctgcagacagtatttataaaagcaggacggaaattgtcagtaaaaattaagggaatataggaaatacagagaataaagctgcggtgatatactttgacctgtaaaacattatgtgaaaggggacagagttatgaaaaaagcagctttattttttttgttagcagtaatgtcaggaagtgttcttacaggatgcggttcaggttcagaaacagtggaaaaaacagaagttacggcaacgccgaaccccacaaaagttccccaaaaatcaggaacttctgagaaaacaccggcaaatgaaaacaaatcacagggaacttccaacgaaaaaaatgattcttcggcaggtggttctgattcttcagaaaagacagaagaagatacttccaggacaatagaagaaaaggtagaaagcggagaaattacacagggatggaattcaatcgttctttatgatattgatctgaatggagttcaggtaaaaagaggggatgacggtgtctggtatgacgaaaacggagtttcctacggagacctggacaatgctgatgaatctcagcctattatcaatgagaacggcgatgtctattactggaatggagatatggcggaacaggcagcagaagaaaattccgataactcttcagaagattcttccggtacagaagatatcagtgatccctttgatctgtacagctgggatgcgggaaccggtcagtatatcccgttccaacaggcagagacggatgcctctcctgtcggaagaggaaacggctggtactattatgatgaagaaagcagcgagtttcttccctggtaggtttttgcatcaaaacaggagcctgcgcaggattacaagaaccgtaatgtgcagcggataaaatacataaaagaaatatttggaaagctttccgcggataaagcctctttgtccgttatacatattaatgggcagaaaggcaaagcaggctttccattcatatgcaagccaacagctccctatgatcgcctggggagctttgtcatctcttaaaaggtacatgatcagaagaaagataaagcccctccatccataatctgcctgaaggaaaaaggaaacggccagaagcccgctcagggtcaggaatagcctggtgcggttttctcggaaatgttccagtgcgcagaaggcaagatagcccagaaataaagtaaaaaatacattttgttttttataatgccaggtatctgcaaacatgtaattccacggaagctcagagatcagggcaaagagaagcagatttctgccgtaattttttctgtttcgggtatgggaaaagccttccagcagaagaaaacagaaaataggaaatgcaatccggccgatatcccggcagatacggtaaggcgtataagcgttttgcccgatacaaaaaagcggagtcagggctggaggatactgtgaaagaagaatacaggcgctgtggtcgatcagcataacaaaaatggcgatgagcttcagtgcgcttccacttaaaatctgaaatttctgtggaagaaaggacggcggaagagcactgccgtggtgattttgagacataggaacctcctgtgtgatttttattcagtttatcatattctgaaggggaattccagaacaggatttagaaagagcagatacctgtctgtataaaaaagaataaaattataagaagtgacaggaaaacatgatatttttttacaaaatttgactggactattagacagttttatgagaaaatattgtaaggttgttaagggtaccttgacaacattaaagtaaatctacacttgaaaggagttttacaatgatttattcacgcgaagtagaagaaatgtgtccagtggcacagggcgttcatcatggggctgctccgatcccggaagaagcaaaatgggtacaggcaaaagaagtaaaggatatttccggcctgacacacggtgttggctggtgtgctccgcagcagggtgcatgtaagctgactctgaacgttaaagaaggtatcatccaggaagctcttgtagagactatcggatgctccggtatgacacattctgcagctatggcttccgagatccttccgggccgtactgtaatggaagcgctgaacacagaccttgtttgtgatgcaattaatacagctatgagagaactgttccttcagatcgtatacggacgttcccagtctgctttctctgaggacggacttccgatcggagcaggacttgaggaccttggaaaaggacttcgttcccaggttggtactatgtacggaactctgaaaaaaggacctcgttatctggaaatggcagagggttatgtaacaggtatcgctcttgatgaggacaacgagatcatcggatatcagttcgtaagccttggaaaaatgactgatttcatcaaaaaaggtgatgacccgaatactgcatgggaaaaagcaaaaggtcagtatggccgtgttgacgatgctgttaagatcatcgacccgagaaaagaataattatttttagatgaaaaaatcaggaggaaaagtaaatggctttatttgaatcatacgagagacgaattgacaagatcaattctgttttaaacagctatggaatcgcttctatcgaagaggcagaaaaaatcacaaaagatgcaggtctgaacgtttacgaccagatcaaaggcatccagccaatctgctttgagaacgcttgctgggcatacatcgtaggcgcagctatcgctatcaaaaaaggctgcaaaagagcagctgatgcagcagcagctatcggagaaggtcttcaggctttctgtatcccgggctccgttgctgatacacgtaaagtaggtcttggccatggtaaccttggcaaaatgcttcttgaagaggagacagagtgctttgcattccttgcaggccatgagtctttcgcagcagctgagggtgctatcggtatcgcagaaaaagcaaacaaggttcgtcagaaaccgcttcgcgttatcctgaacggtcttggaaaagatgctgctcagatcattgcaagaatcaacggatttacatatgttgagacagagtatgatccatacacaaacgaagttaaggaagtattccgtaaatcctattctgagggacttcgtgcaaaagtaaactgctacggcgctaacagcgttccggaaggtgttgctatcatgtggaaagagggcgtagacgtttccattacaggtaactccaccaacccgacacgtttccagcatccggttgcaggtacctacaaaaaagagtgcctggaaaaaggcaaaaaatacttctccgttgcttccggcggtggtacaggacgtactcttcatccggacaacatggcagcaggtcctgcttcctacggtatgacagatacacttggacgtatgcattctgacgctcagtttgcaggttcctcttccgtaccggctcacgtagagatgatgggtctgatcggcgcaggaaacaacccgatggttggtatgactgttgctgttgccgtttccattgaggaagctgctaaagagggcaaattctaagaaatgctttaaaatcaaggtttttggagatggttgaacatcaataaaaaacgttgaaaactgagtattaatacaatgcttatacattattaatacaatgttatcagtatattaaaagcggcatccacagaggtgccgctttttcataataatctatttttcggccataacagacataaattctaaaacagccataataagagaatagattaaaaatattactaaaaatataaggaaaagacacaaagggtagacaggaaaaatcagatctatgatttttctgtaatttatatacatgagtattaagaatattaccgttgctacaaataaaaaacttgttattagcttggcgtgaggtatccaaaacagttctttcttttttctagttctgatattatttttgtacataaaaatccctcccatttatgaattgtaccggcttttgtaatttgtcaaatttaatctttggtgagaggtaataaggtgtatgtatactttaatctgtgaatttatgatatcatatcaaatatgcaaaatcaattgttttgacagaagcaggaaacagtagaaggaaacatttccactgtgcagaggattgactttcttcggaagaacaccttataatatctgaaaaaagcaagagaggaaaaatcatgagtgagataaaaatcagcgtagcaggtccacaggatgccgaagaattactggaaatctatgctccttatgtgagggatacagcagtatcctttgaatatactgttccttctccggaggaattcagacagcggatcattcatacgctggaaaaatacccgtatttaaaagcagaaaaggatggggaggtgatcgggtatgcctatgcgggcccgcttcatccaagagctgcttatgcctggtctgtggaaacttctatttatgtaaaaagggataaaaaacatctgggtattggaaagctgctttatgatacgctggaaaagatcttgaaagagcagaatatcctcagtgtcaatgcctgtattgcctggccggaaaaagaggacgaatatcttaccggagacagcgtaagatttcatgagcatatgggttatcgtaaagtggcggagtttcataaatgcgcctgtaaattcggacgctggtacaatatggtctggatggaaaagcatattggagtccattcagataatccggcagaaataaaaatatttgacgaagtccgggggatgctgaaatagtgggaacacagaaggtaaaaggaaaattaaataatatagagtttatcagattcttttttgcagcagcaattatatattttcatcttcttcattcttttatgatgccttatacgggagaatcggtgatttatcagaatcttgcagaacagtcaaagtacgcaaaatatattgtggaatgtttttttattatatcaggatattttctgtaccgctctttactgtcccggcctgaacagaaaacaactgattttttatggaaaaaaattgtccgtctgtggccggtactggcagtttctacggttttttcagttgtatttcttgaagttccggcaagcgaggggattttaaatctcttctttttgcagtctacagggcttacaacagggtggaccggtctgaactggtatgtttccgccttcttttttgcagaggttttttattttcttttacataaagcaatgaaaaactcagcgggaatgaagcttttgatatgcgtaatcgcgtattttggctatacgttgaatattatgactacagacggcggctttggcagaaaagttgtttacggagtattcagccttgctatggcaagggcggttgccggcataggaacaggctatcttctgggagttttttatgattccgtaaaagaaaaatgggaaaaaccagaaggagatctcttgcacgaaaaaaagaggaccataatgatctctttcatagagctgggaagctttttgtttcttctgacagatttttttgcaggaaaaaatgcagggaaaaatcagttttctgtagtggtcttcttctgtatatttttcctctgtatgctcacagaaaaggggcttttatccagaatcatcagcaggacaggtttctgcagactgggaaaatattcctattccatatatgtaatgcaggaagctgctttttatattctcagccatacactgtggaaaaatgcaggatttttaaagcgatgtccggcagctgcactgggactgtctgttgtcctgaccattctttttggcgcaggtatttattatctggtggaaagaccgatgcaaacagcgggaaaaaattaatttttcctgctgtttgtaaatttagatgcaatttctaccaattggtgggctcttgcttcgaaagaaaatttttcatgtatcagagcttgttgttcaaggactgtttgagatatctgggaatagttattttctatgtcatgaatgcagtttttgaaatcttgtctggtatgataatacaggatagcggttgggaatattttttttaattcatcgcattcatcggaaataactggaagtccacaggccagcgcatcaaaaatccgattattaataaattgcttttgcagcatatcgtcccaatgatcatttaatgttactttggctgaacggtagatattgggaagttcataattttctacagaaggcgattcaaaaagatccatatgatctttgagtatagtattccagccacttccccacatacgaagcggaatattttcatcaatggcccacataacacaattacgggctacacctctggaattcccgataaaaatatagtcccattttttttcctgatgtttatctgctggaaaaaacagctctgtatcagtacattgtaaaaggggaaaaacaggtacttttacctgatttctgattatctcagcatagtaatcagaagcaatacatacgacatcataaagattgtattcatcaattgtaatcttatctggatgactgatgttccacatgatatagagcgctgttttgttacggcggtcagggcggtagaaataggttcctcttaaaacaagaacaacatcagcgccttcttcacatccccagtcttctcgtgtatcaataataacaaaacaattcagacgctccaggtactttttcagagctaatgcatagggataatcaccccacagtactttatctttaccttctggagcaggacatttgattacccagattggacgcccgccagcagaacgtttattttcagccgacattgtcttccatctatcccggcgcttaagttcccagtcaagatgatcatttatggttgatgcaatacgattatgttcggttgtgatatggtgcaggagattttgaatattattttgttgttgctttgttatatgtgtttccagagaggagagttgctgtatgatttcgtcaaaagatgcactctgatagttggttaattggttgaatagagcagattgcttttcaatttgatttgtataagtactttcaaggtctttaatttttgcgtcaacataggttctgctgaccgggacaaagcgccggagatatttttttattttcataaattccctcataaaataaatgtttgtagtcttttgtatatcatagcatgatgctgcaaaagattcatgataattacgtgaatgtgaatgaaaattaattaacagataataagattgttttattattgtgagaaataaaaactgtttgtaacaaaaatgttacattggtttgtagttaaacttgatattatgattgtatcatgttatacttacgaaaaaatgtaatacagaggattgatatgaattatataccacaagcagaaaattgtatgaaaaaaggcggaaggattgaaacaattgatattgcaaaagggttagggatattatttgtagtgtggtctcatgcaaaaggtccttttacgccgtatatgtatcaatttcatatgccgttattttttttgatttcaggtttcctttttaacagcagaaatactccggctcagtttcttggcaaaaaggtcagatctttatatattccttttgtattttggaatctttgctctcttctgattacaacagctcttcatatacaggagttttcagatatccatttagttaaaaaaatacttaaaattattcttacattagacaaggacggcaaatttatgggagcgacctggttcttgggagctttatttgttgtatcagtagtgtataaattaatggattattatatgccatcggtaaaagggaaaagtatatttcttgtgattttatttggatgtgttgcagcaactggtttttcaattaattttccatatttattgagcaggacattgattctttctttttattttgcaatcggacgggcagctaaagagtacaaagaagtaatatatgtatatcattcaggtattttggtttgtttttcaattatattgtttgccataattggccattataatgccatcaatatggcgaagaatacatatacttatccgtttttatttgcgataggggcattgcttgcatcatatgtggttatttatgtttcggaaattttgcaaaaaagaaccatatggataaaaaaagcattgattgtaatgggggaaaacagtatttcaattgtaatctggcaatttgttgttttttggattattgaggcagtacaatttaagttgtttgggattcctttcgtacaactttttgaaaattatccaccatataaaaccacgaacggctggtggattgtatatttgattgttggagcagttgcatccatgctgattggagaaattatttctgcagtaaagcagggaattgggcgtgttacgaaaaagattttaatgaagccatataaaatgtaatattcagaaattttactgggaggaaaatagatagtgcagcatgaaaaagaaataccggatgtttcaattattattcctacatataacgtggagaaatatattgaacagtgtttgaaaagtttattcgctcagaaatataaaaattttgagataatctgtgtagatgatggttctgatgatcagacggtttttataattaaaaaatatatgcggttgaataaaagaattcgattatatgaattaccgcattgtggtaaagccggtattatgagaaacctgggaatagaaaaggcagagggagaatactgcctttttcttgatggagatgatttttttgaacctgaattagttggagatacattaaaaagaatcagggaagataaaagcgatatatgcctttttgatgcacgcttgtattatgagaaatctggcaattttatagatgcagggcacatgttaaaaaaggagtatgttcctcagaagattccgtttgaaggcaaaagctttccttatattttcaatatcagtacaggctgtccgtggactaaattatatcggaaaaattttataaaagaaaataatttacaatttatggaaacacatcgttctaatgatctttattttgtatgcatatcactggcaatggcaaaacgagttacgattcttgaagaaaaactggttaattatcgaaaatcatcaggaagcttgcaggctaataatgccaacagtccgtgggactggtatgaagcattgaaagcggtaaggacaaaattaatggaactgggaatttatgaagatgttgagtacagttataaaaattatgttcttgatgtcagtttttataatttggaatcaatgggaaatgctcaggtattttctatggtatatgaaaaaataaaaaaagagatttttaaagaattaggtatggaagagttaaaaaaagaagagattaattcctggaatgagaagtactatgagcaatatcttcagttaaaagcatccggtgaaaaagaatatttattttacaggataaaagaattgaaaaaagaaaatcaatattggatggagagggcaaggaaagcagaacaggatactaaaaataatattatatatattacagccaggaatatatggattatggctagaagaatattgagaaagaaaggaaattaaaaaagcatagtattatgtgtttcgatgaaagtgttggcaacaggaatgttctatgttaaaatgtacatagctgaaattggaacaattttatgagaggaaagaaaaatgactgtaaaagtatctgtgatattacctgtatataatgttgaaaaatatttgaaagaatgtttggattctatattaaatcagacattacaggaaatagaagtgatttgtgttgacgatgggtcaacagaccgttctctggagattttgcgagaatatgaaaaaaaggataaaagagttattgtactgactcaggagaataaaggcgcaggcgctgcaagaaataaaggacttgctattgcaaagggcgaatatttatcatttttagattccgatgatttttttgcttccggaatgttggaagaagcttatcgaaggtgcgttgaaaaaaaagcacagatatgtgtttatcaggttttgcgctataatgaaaaaacaaaagaaacagtatatgacaaagggtcattcaagaaagagaatgcacccagaaaagatgtattttgttataaggatatgccggatcatatattagattcatttcaaaactgggcatggaataagctgattagtcatgagcttgtaaagaaatatcatattaaatttcaggagattttcagaacaaatgatttcctttttgtggcatcctgcatgatgcttgcggacaggattactcttttagaaaagaaattggtttattatcggattggaatgtcaaataattgtcaggcaacaaactataaattcccattggattttttgacggcattttatgcggtaaaagattttcttgaaaaaaataatttttattctgctgttgaacgcagttatgtgaataaagctttagcaggttgtatttataatatgaattcaataggagatgtgcaggcaaaaaaagctgtttttgatgaactgaaaaaagacggatttaaaaagctgggaattgaagggaaaaacgaggaatatttttataattacaataagaataactataaaatttttcgggagattagtatgagtgattttgacgagtttatgattaaaaacggatccagaatggaaaagagacaatttttacaaaacaagtatcttcaggtgaaatctgatattcccaaagtgtcgatcgtggttcctatttataacgttgaagactatctggaagaatgtctggagagtgtggtcagacagactttggaagatattgaaattatatgtattaatgatggatcaacagacagatcaatggaaattcttaaaacatatgcagccgcagatgcccggattattgttgttgataaaaaaaatgagggatatggtattgggatgaatattggtctggacaaagctaccggtgaatatgtcggtatagtagagcctgacgattatgtaccgttaaatatgtttgaagatctttatttaaaagccaaagaatatgaacttgactttgtaaaggctgatttttatcgctttgttactgctgcaaatggaaatatgcagctgacctacaatcatttaaccggaatgaaagaaaaatataatgttgtttttaatcccagtatggagcctgaagcattgacatatgttatgaatacctggagtggaatatataaaaatgagtttttaagagaaaaccatatacgtcaccatgaaaccccgggtgcgtcttttcaggataatggtttttggattcagacgttctgttatgcaaaacgtgctatgatcttagatataccatattatatgaacagaagagataatccaaattcttcagtaaatagtccagagaaagtttactgtatgaatgaggagtataaatacattaaagaaatgctgtcaggaaatactgaattgtggaatagatttaagtattactatacatggaaaaaatttaataactatatgtttacattaaacagaataaacgttaaatttaaacatcagtatattcttgatattagtcaggaaatgaggcaggcagaatcagattatgaattggataaaagcctgtttagtgacatgaaccgaaaacgtcttgatatgctgatggcaaatccggaagctttttaccatttggaatgtatcagcggaacatcaaatctggaaagacgtgttgcagaactggaaaattccactacaatgaaagtgggacgtatggtaatgtacattcctattaagattaaaaaatttatcagaagaatgggtaaaaaataattcagatatttttactgtctgtagaaaggacaagtggcagatcatgcagaataaatatgattatttagtagttggagccggattgtacggagctgtttttgcacatgaagcccaaaaagccggtaaatcagttcttgtgattgataagagagaaaatattgcgggaaatgtttatacagaaaaaatagaaggaattcatgttcataaatacggagcacatattttccatacaaacaataaaaaggtgtgggagtatgtcaatcaatttgctgaattcaatcgttttacgaacagccctgttgctaattttcatggagaactatattcgctcccatttaatatgtatacctttaacaagatgtggggtgtggtaactccagaagaggcagcagctaaaattgaggaacagaaaaaagcggcaggtattacaaatcctgaaaatcttgaagagcaggcaatttctcttgtaggcaaggatatttttgaaaagcttattaaaggatatacagaaaaacagtggggacgcagttgttgggaacttccggcttttattatcaagcgtcttccggttcgcctgacatatgataataattattttaatgcgctttatcagggcattccgattggtggatataccaaaatggttgataatatgttaaaaggaatagaagttcgacttggggaggattatcttcagcagaaggatgaatatgattcaatagcagacagagtaatttatacaggtgcaatcgatgcatattttaattttgctattggtcatctggaataccgttccgtacggtttgatacagaagttttggataagccgaattatcagggaaatgcagcggtgaattatacggacgtagaaacgccatggaccaggatcattgagcataaatggtttgagtttggcaaagatgaacagggaaacgatcttccgaaaacagttatcagtcgtgaatatagttctgaatggaaaccaggtgacgagccatattatcctgtaaacgacgagaaaaacggtgcgctttattctgagtataaaaaaatggctgataaagaagataaagttgtatttggcggacgacttggagagtacagatattatgatatggatgctgtaattgcatctgctttggacatgtgcgaaaaggagcttggagtataatgccctttggctgagagaggtaaataaaatgaaacgtgtaatcacttatggaactttcgatttgcttcattatgggcatattaatctgttgcgtcgtgcaagacaaatgggagattacctgatagtggcattatcgacagatgaatttaactggagggaaaaacgcaaacaatgttatttttcctatgaaaaacgcaaacagctgttggaagcaatacgatatgtggatttggtgattccggaggaaaattgggagcagaaacgtaatgatgtaaaagagtatcatgtggatacctttgttatgggagatgactggtcaggcaaatttgattttttaaaggaggaagggtgcgaagtgatttatgtgccacggacacctgaaatttccagcagtcagattaaagaggaacttcactctaaaaaggatatatgaaagtgaacgaattgaccgggattatatcccggtcaattcgtttaaagaaccaaatcggtatcccatttcttcccatttgctaagaagttcgtcaagaatttctgcatttgttgaagatgtattatgaagaagaacgatggcaccaggatgtatgcgggaaagcaatttgtcaaaggcttcttcttttgaaggttgctgatcctgaatccagtctacataagcaaggctccagaaaaaagttgagtatccgaggtttttggccatagttagattttccgtactgtaaattccgcgaggaggacgataaagtttaggcatatcttgatcggttatgttcttgtacagttgttcgaccgaggaaagctcattttgaaaagcttgtacagaagaaattttggacatatccggatgagtcattgtgtgatttccgaccgtatgtccttctgaaatcatgcgttgaataagtttgggattatcggctataaaatttccgactacaaagaatgtggcaggacagttgtgtttttttaatgcatctaaaatagctggggtatttccgttttcatatccggcatcgaaagtaagatacagaatttttgagtctgtattttgagcatagtaagcattatatttttttaattgttcgattgatgcgttaccggtaggacgcttcccttcttcgtcaaaaccaagaccccagtttgtggattctgaggagatggcagaggaactggaatttatagaggatgatgctattgacggtacatgcttggggagcttttcaatccgtgtgacaatttttcctgttcctgcacccaggataaaagagcctgtcagaattacagcaatttgatatttgagaataaatctggtaagagcattctgctttttaaaaaacatatttataaaactccagtacaaatatttgatattaatatatgatagaaaaaggataatagaatataaaaaatcaaaatataacgaaaatatgaaagaaagatgaaaattatattgaatttcatatagaacctgatataatcataaccagagtaacagaaacagacagtatgaaataaggagtaatatatgaatcggaagctttgtaagtggaaaggtatattttttttgcttatgttattttttttgttgtttggcggaaataagcaggtttctgctgcatcggcaaagtgtaaagtagtatttgctaatgcccggggggtagtgtcaacgccaacgtataaaagttgggagaggacagtaaaaccaggacagtggattaatcttccggagtattcatggtccggatacagatgttattgggaagagaagtcgggtaatacggtaaaaagatatagtcccggggcaaaatataaggtgacaaagaatacaaaattctgtctgcatagatatgaactgtatgatgtaaaattttacagtgaagatgggaaaaaagaacataaagatttaagaaaacaggcgattaaaggtgaaaatataacactgccgtcagtgccccattcgtcaacaacaatgggactgggatggtcgactacagcgaatgctaaaacgtatcaaaaaccgggaacaaaaattaaaataaatggggacatgaagttttactcaaaaactcagacaatcactagtgtaaacttgtataaatatgatggcaaattctggaaatcagtacctaccaatacaggaagtacgccagtatttccatcagtaaatttaggaagcatcaatatgtgccttgggtggtctaagacaatgggaaaaaattccagaccagagtattatgccggagacagaatccctacaaaaacaggtaattattatatggtaaaatttggacctgaggatgacaaagcaccttcttatatacgaactccggaaggatatgatatggtttactttgttggagattccagaactattggacttcaatggggactgggatcaagaaaaccatctaatgtggattttgtagctgatagcggtgaaggtctggagtggtttgaaagacgagatgatacaggaggatataaaaacctttataggaaagtgcgtaaaatatttgaaaattccggaggaagagccagacaggcggtaataattaatcttggagtaaacgatctttggaattcgtcttcatacatagattatatgagacgtgtatctcaacagttaagaggcgagtttagatgcgatatgtactatatgtcagtaaatcctgtaaacagtgccatgatcaaagcatatggaggtacatatagaacagaagctcaagtagctgcatttaataaaagtatacgtatgtcattgtgtagtggaagcaataactattttacgtatattgatgcttgtacggcacttcagaagtatggatggatcagtaactttcagaataaaggaatatatgacggtgtgcattattcttatcaaacctatctcagaatttatgattattgtataaggaatttgaggagataaaaagcaaaatggcagagtagaaactctgagaccatttcaagctttgtgtaaacaaaaaattgatataagatatgccattagttattgaggggctatcgggaaatagatagttccaaacaggggcagatttgactcatgcgagtcaaatctgcccctaaaacttttccataaaaagagaaaaaagatggctaatgacaaccgtctcctctccgttccatgttataatggaactatgctaaaacaaaattattaatcacatctatttatggattgacaacagtaaaaaaataaagtaaactaaagttagttaaaactaattcaaagaggcctatgtttagataatgggataggtttataaaactgtaaaaacgtacatcggatgtttttaatgaaagcaaggtgtacatattttttacacgtgaattagcgaaaactaacttatgataaaaacttacggaggagagtagattcattttcagaaaagatgtttaaggagaagtgaaagaaaatgtcagaggaaatgttagtatgctattgttcgcctacattagctgggctgaaaacaggaagtcttttttcatgcccttatagttctcaaaagatgatcataaaagaaatacgtgaatttaatcaaaaattgacacaaaaaggaatccgtattatcccggttcacatatcagacaaacgggcgttgatttatgtctatcgtccggaaaagttaaaagaagatttttctgatgagacaactcagatcatattgaaatgcaagggatatgattgtacgaacccatcacagtgcatctgcagattgatccaaaaactgcagagtgccccggattttccacatgaaataggtttattcttaggatatccggcagaggatgtaaaaggatttattgagaataaggcagcctgcagcaaatgttccgggtgttggaaggtatacggggatgaacaggccgcgaggatcctgtttaaaaaatataaaaaatgcacagaaatttattgcaggaaatggaaaagtggcgtggctgttgaacagctcacgattactatataatcacaaacttcagaaaggaagataaaaatcatgagtaaaattgcagtagtttattggagcggcacaggaaatacggaagccatggcaaaggcagtactggagggggcgaaggagaagggggcagaggctgtattattagctccggatgaattcgatgtttccataatggagtcttatgatgcaatcgcttttgggtgcccggcaatgggagctgaggtattggaagaagacgaatttgaaccgatgtttgcttcctgtgaatcaaaactttcaggaaaaagaattgcactatttggttcttatggctggggagacggagagtggatgagagactgggagacaagatgtaaagaggcgggagctgtcttaatttgcgaaagcgtgatctgcaatgaaatgcccgatgatgaggggattcaatcctgcaaagcgttgggtgaaaatctgggtcaataaatattgggggaatgctgcgagaaaagatttttaatcagtttacagcggcattcccataatacgatttataaggtaaccgatgattaagaatggctgattttgtagatatctgttatcggagtgtttaatgaatatattaaaatgggaggttgggtatgagtgttgttattataggtggacatgatagaatggtctgtcagtataaacaaatttgtaagagattaattgtaaggaaaaaattttacacagatgtctgcaaccttagataaacaaattggggatccggaactgatcgtactgttcacaaatacggtttcccataaaatggcccggtgtacagtggaggagacggaacgctgcagtgagatgccatacaagtagtaaaatgcgttacgggagattcttggaagtatctgtatgtagcgaaatttgttttttattggcaaagaacagatattgttttggtgagtttatagaggtataggttatgtctttttttcaaaatacttgtaagccaaaaggaatcggcggcaaaattatggttcatatgatgaacaccggtcattcatctatggctgaatggggatttacacatatggaaattcaaagcgatgacgtatgtttggatattggatgcggcggtggggcaaatgtcagaaagttattagaaaaaagtccgtatggcagagtgactggcattgattattcagaaatcagtgtagaaaaaaccaggaaaatcaataaagcagggatagaaagtaagcgttgtgaaatcctgcagggcgatgtcatgaagctccctttcagagatgagatttttgatgtaattacagcgtttgaaacaatatatttttggccggatatctgtgaggcttttaagcaggtgtataaaattctgaaagttggaggaacttttatgatctgcaatgaatcaaatggtgaaaatccaagggatgaaaagtggacgaatagaatacagggtatgaaaatttacaattctgagcaaataaaaaagtttttagaggatgctggttttacagacgtaaaagtagataaaacgaaaaaagggtggatttgtgtggtggtgaaaaagttatgaaaaacaaaagaaaacggtggtatttattgtggtttgtaggatcgctgatatggatgacgaattttttgacagtttcggaaaagacggacttgatttttgggtgagcatgcaacttttaaccgcaatactcttctttgctgcaggcattgttgggtatatttcatatgaaaaacacgatagagatcaataatgcaattctaaatatggagaatgaaaagattatatgaaaaaaccgggaaagtctaaaattcccggttttaaaatgctaattagcctgcagtaggaaaaatttatttgatatgctttttgattgcttcaaagctttcagaactgatgacatgttctatcttgcatgcatcctgtgaggcaatatctggatcaacccccagatgttccagccaggaagaaagaagaacatggcgttcataaatctgtgtagctatttcttttccggactcagttaaattgatatatccttccggagatactgtgatatgtccgcttgtgcgcagcttcttcatagctacacttacgctgggctttttaaaatctaattctgtagcgatgtccacagaacgaacaacaggacgttttttgctcaatattaaaatagtttccagatagttttcaccagacggatttatatacatagattgtcacctcttatatcattcagaatcttttataaaaattgtatagttattgtatcataattcgtggtattcagccagatatatttataaaataaaatagcaataaaatactataaataattattgacaacttacaggaattagaatatactaacaatatcaaatgagaaaaatatttaagcataattgtaaaaattgccataaggagcgagtggatatgaatttaataaaagccaaagaaggggaagaatatatcattaaggaaattttgacagatgatgaagaactgacatcttttctgttttctcttggctgttacagtggtgaaccaattacagtggtttctcatctgaagggtggctgtgtagtctccattaaggatgggcgttataatattgatactgatctggcgaaagccatttcaatataataaaaatggtggttttcactattttttttacacagcagttagtatacactaatgaaaataagatgtgtataacaaaggcatcaaaaggaggagaattatgaggattgcttttgcagggaatccaaacagtggaaagacgaccatgtacaatgcacttaccggcaggaatgaacatgtcgggaactgggcaggtgttacggtcgaaagaaaagaaagtccgatcaggaaaggttattatgacggaacggaggagttggttgcggtagatttgccgggcgcttattctatgtctccttttacatcggaagaaagcattaccagcggatacgtcaagaatgagaatccggatgtgatcatcaatatcgtagatgctacgaatctgagcagaagcctgttttttaccacacagcttctggaacttgggattccagtagttgtcgcactaaataagagtgatatcgttaataagaaacagacaaaaattgacgagaagattctgtctgaaaagctgggctgtccggtgatcaagacgatttccacttcttccggacatgaaggactcaaagagactgtaaatgctgcggctgcattaagaggaaaaggtcagaaagcaccttatgtgcaggcggatattgattttaaagataaaacagcagtagaagcggctgacagaaagcgttttgagtttgtaaatggaatcgtaaagcaggtagaaaagagaaaagtttttacaaaggataaaaacgtgcaggataagattgacagtatcatcacacataagattatcgggataccgattttcgcagcagttatctttcttgtattctacatatctcagacaacacttggtacatggatcgcggattggctagtggcatggattgagacttttcagggatgggtcggcggactgatggaaaatgcaaacccgcttctgtatgcactccttgtagatggtatcatcggtggcgttggcgcagttgtcggtttccttccgcttgttatggtcatgtatttcctgatcgcactgctggaagactgcggatacatggcgagagctacagtagttctggatccgatcttcaagagagtagggctttcgggaaaatccgttattccgatggtcatcggtaccggatgtgcgattccgggtgttatgtcttgccgtacgattcgtaatgaaagagagcgccgtaccacagcgatgcttacaccatttatgccatgtggggcaaaaatcccagtgattgctctgtttgcaggtgcattctttgcggacgcatggtgggtttcagcaaccatgtatctggtgggtattctcttagttttgcttggagctttacttgtgaaaaagattacaggacaaaaatacagaaaatctttttttatcattgaactcccggaatacaaacttccaagtttgaaaagagcatgcggctctatgctggaacgtggaaaagcatatatcgtaaaagcaggaacgattattctggtatgtaatacgattgtacagatcatgcagagttttaactggcagttccggcttgtggaagaaggtgcggaaggaacatctattctggcatccattgcccatccgtttgcaattttgttcataccgcttggatttggagtgtggcagcttgcagcagcggcagtaacaggttttatcgcaaaagaaaacgtagttggtacgcttgccgtagtttatggtatcacaaacttaatagatacagatgagctggcgttggttggaagtggaaatgaagtagcaactgttatgggactgacaaaggtagcagctcttgcttatttgatgtttaacctttacacaccaccatgttttgcagctcttggagcgatgaattcagaaatgaagagtggaaaatggctgcttggaggaatctgtctccaacttgcaacagggtataccgtagctttcggtatatatcagattggtacattgatcacaacaggatctcttggcaccgcatttgttccaggtctcattgcagttattgtatttgctttgattattctctggagaatccgcaagtcggataaagaatttgcttcggaatacagcttacattctgtaagatcataggagtcaaaagtgataaacatacggtggacagaggagagatgctttgtccgccgttttcattagggaaaggatgtggtgtgatctatggaaaatattattgcggttcttgttctagctgttctgattggaggtgcagctgcgtatctggtcagggcaaaaagaagcggagtaaaatgtgtcggttgcccggcaggagggaactgctccagcagacataaaaagaaaaagaagaaactgacgggggctgtaattgcgaaaaaaactatcattatctcaggaatgcattgtgcgcattgtgtacaaagcgtgacagacagcctgaaccggattgatggagtctctgccagagtagatcttaataaaagttgtgcggaaatattccttgaccgtgaggtaggggaagatatcctaatcagtgcagtggaaaaagaagggttttcagttgagtctattcaaagctagaccgtgatatttcatatgggagaaaacggggatgaacggtgaaaaagaaagtattattataaaaaacagagtcttatagagaaggaagtgatgcggttgtgaaacaacataggttttgggcatgggcgtctgtcttttgctttttgatggtattctatacaggctataaacacaaatgatcaggaggtacataggatgtttagtgattctactttgaaaaaaatcggatgttttgcaggaggagtcgtatttgggactgcgggtgtaaagctcctttccagtaaggacgcaaaaaaggtatatacaaactgtactgcggctgtgctgagggcaaaagactgcgttatgaagactgttacaacagtgcaggagaatgcagaggatatccttgcagaagcacaacagatcaatgaaaagcgtgcgcaggaagaggcaatgcaggtgcaggaagatgatgttcaggaggatggtgcgtctgaacaggaagaaaacgaataggtaaaagatgaaatttcttatcaagcatgaagtacagggccgtctccgtatccatgttatccgcaaccggatgacatgtgcggaggcggatgttctttgctgggtccttgaaaaacagaaaaatgttgtaaaggtcaaagtatatgagcgcaccgcagatgctgtgatctattatacaggggacagggaagaactgatccatggattaaaacagtttcattttgagaaagcagatgttccggataatgtaatctcaagctccgggcgtgatttaaattctgcatacagggaaaaactgatcacaaaaacattgctccattatggagggaaattgctcttacccaatccggtgagaaaaacatggctgactttgaaagcacttcaatatatcggaaaagggatccggtgccttgcaagaatgaaaatagaagttccggtattagatgcaacagcaattggtgtgtccgtactgaggggagattttaaaacggccggttctgtcatgtttctgctgggaatcggagaattgctagaggaatggacccataagaaatccgtaggggatctggcacgtagcatgtctctaaatatcaaaaaagtgtggttgaaaagagacgagcaggagattttagttccggtctcggatatcctgccgggtgacagggtgatcatacatatgggcaatgtgattccgtttgatggagaagtgtcttgcggagaaggtatggtaaaccaggcatctttgaccggagaatctcttccggtacgaagatgcgagggacagtccgtatatgcgggaactgttttggaggaaggcgaattggaaatcgtagtcagagctgtatcaggctctacccggtttgagaagattgtaacaatgatcgaagattcagagaaactgaaatcaaatctggaaagcaaggcagaacatctggcggaccgtctggtgccttatactctggttggaacagctatcgtcggtctgctgacacgaaatgttacaaaagcgctctcagttcttatggtggatttttcctgtgcattgaagctggctatgccgattgcagtcctttctgcaatacgggaagcaggacagaatggaattaccgtaaagggtgggaagtatctggaggctgtggcagaagcagatatcgtcgtatttgataagaccggtacgctgacaaaggcgaaaccaatcgtaaaagaagtcattgtgtttggtgattatccggaaccggaagcactgcggattgctgcttgtctggaagaacattttccacactctatggcaaaagccgtcgtggatgctgcaaaaagaagaagtttgtatcatgaggagatgcattccaaagtagaatatattgttgcccacggtatttcctcctatatagaagggaagaaaacagtcatcggcagcagccattttgtgtttgaggatgaaaagtgtcggattcgtccggaatatcaggagcggttcgatacgcttccaggagaatattctcatctgtttcttgccattgacggagaactggttgcagtaatctgtatcgaagatcctctcagggaagaagccggggagatggtaagacttttgaaagaagaaggcatttccaagattgttatgatgacaggagatagtgaacgtactgcagtatccattgcgaaacgagtgggagtggatgaatattattccgaagtgcttccggaagacaaggcagacttcattgaaagagagaaagccgcaggaagaaaagtagtgatgattggtgacggaatcaatgattcgccagctctttcagctgcagatgcgggaattgcaatcagcgatggagcagaacttgcgcgagagatcgcagatataaccattgcagcagaagatttgagggagattgttatactaaagcgcttgtcaaatgccatgattaatcgtatccaggggaattataggggagtcgttggaattaatgcagcattgatcgcacttggagtggctggcataatccgaccgacaacttctgcattgctacataatacttctactctggccatcagtttgaagagtatgggaaatttattgccgactaattaatataaaatattcatatcgttataatttttaatgtctgaatagtttgatttgtagactattcagatatttttatagaactcaataattgttgtctaactacagaatttgcagatatatttccgcaaacaaacggagatattttggcatatatcatattagtctggataaaattcccgacggccggcatcaatcagggcctgtcgttccatgtggagcctgactgcaaatcagtgcgaaaataggcggttttgcaggatttcagggataaagcgcagtctgtttgcaacccatttgccacccgaaaaaatgaaatgaacaaaaaatgaagaaaagcggttgaatactctgaactaaatcggaatgtccaaccgcttttttatttactagggattgaccgcagtgatgtaattttttcctccccccccctcaattttgaaggataggagaaaatgatttacggatgataatatctcagcacgtgttccgggtatttctgatcgccgtaatcccatgggccggcagtctcataaaaaggatcgttctcagaccgcgcagtttcgccgctggccattttggcaaaagcctctgaagttttttcagaccaggaggtgataccgttcttttccaggtaggagaagtaaacgtctgcgccgaaattataagcctgaagggcaaggcggattctgtccatatcagtggggctggatacgcctgctttttccattgcatatttcagttcctggattccacattcaatggagtaggaagtatcggtgatcccatttggaacctgggggtattttttattgtacgcgccctcagaggactgaagaacgtcaggaccgcagccggagctttcctgcatcatcagagcaagaatcagatctgtataatcagacattccgtattctgcggcaatagtctccacatcctgacggtaggcttcacaggcagagttaatagtaagtatctctgacggctgctgccggaaccgtatcatcccgcctgtaacagcaagcagaagaatgatcaatgccgcggcaagaaacagtttctgctttcgtacctgtttttgtctcaagcgctttctgcggcgtgcgcgaagctcccggtgggagctggagtctgttttctggcggcgcgaagctccgggatttttaacagaagcgctttttttactggcaatagaggctttgttattggagactctgttttgggatcttgcagaagatacgttgtctgaggggacagagctgctttctttctgccttgcaggcaatctgttctgttgtatttttaaagtttctttatctgatgtattcatagcattattgtatcgggaaaaccctgttttgaaaagaaaagaattattatgaaagtcttaaaaattggtgaacaccacatagaaaattgaaaatagcaaaggtctatggtatgatttggaggaagtatcgcactcagatctgaatcatcaatgaatatataaagttaagagattttttatgtatactgatttgtaagctattgcagaatgaaaagactggtgggtcatataaaaacatacaccgggcttatccttttaactatcaatgagcaaatttaaaaagcagtaaaatcctcgctgatttgtctttctgagaggcaaatatagaggcaaaaaattcttttttgtccgtatattacggatttcactgtgtgaaacttgatatttggtcatttacagacaatgagatatgataaaacaacatagaggtgacagacaggctgtgccggtaaaaatatgtagtttttaacagggcagccggaaagaaaaggtgaaaagtatgaaaaacagattctggcttctgctgttatcagcggttttggttttcaggggaactgctgtttatgcggatgtggcagattatcagacagtgacgcaggaagaacagaaagaaaataaaaccatacagacttttgagacagacgatggacagggcaattctgtaaaagtcgcagcgtgcagcgacatactttatgtgacagccaaggcagcagccctccggtcagtacccggtgatgaaggagaggctcttgcagaggtcggccttggggatgaagtttccagaagcgctgtgtgcgacaataactggagtaaagtttctgtggaaaaaaacgggaataaggtgatcggttacatacagaatcagatgctcagtgctgatattcagattcagccggagaacgatcaggtagaggtaaaagcagacagcagtattcttgattatccggggagaaaagacggagaagtagtgggagaagtgctggagcttgatcaggtaaagcgcacaggaaccgtaaatgaagtgtggagcagaatttcctatgtggacgaaaacggagcggagcagaccgggtatatccctaccagcgctctggatcttccggaaacggtacagacggcagatgccggaattgataaaaagctggatgcaggaactctttcagaaagcagcggagaaggtgtttttgcagaagcagtggaggcaggcggaagtgtcagtgaagtcaatggagtacaggtgggaactccggttgcagcatcctcagatgcgaacctgaaaccactgggaactttccgcatcacacattactgtccatgcagcatctgttgcggtccgtgggccaatggaatcacgtctacaggtgtaaccgcaactaccaaccacacaatagcagtagacccgtcccagatcccttatggcagtcaggtagtgataaacggacaggtatatgtggcagaggactgtggaggcgccattaagacaaactgtattgatatttatgtggcaacccatgaggaaggcgaggcaaagggtgtctattatacggatgtatacctgatccagtaaatacagaatgcagtttcttttccatgctctgacagtaaagaatccgggcacatttcagcctagacccgggtatgctggcagatgattctggcaacttcttctgcgctttccttctggccgttttcttcccacttcaggaaggtgttcagcagaccgcctgcatagtaataaatatcatataaagactgaacagtttcttttggcagataggaaagcataaattcattgattccgtccatgagaatagaatgaagcccgttttgtgtcatagtcagaaaaaaggttttgtactgatcaaagaatttaagcgaaaagacaacatgagaatactcctggtaatttccaagcccgggagtattttttcgtgcctttaaatagtctgcaacgatttctttcatataatcagtaagcgcttcctgaacagaatcgtagtaataataaaatgtcatgcgggacactccggatcttttcgcaattgcagaaacatttacaccgttcatccctttgtcctgcataagctcaataatggcttctccaatacacatccgggtaaaaagagagcgttctgttttttgagcggttttgtatccgtttccggagcaagcagtatttttcatataatttcctcgtattatgcctgtttctataaaattataaatgagcagatatcgaattttgcacaatagaatctataatatatggacataaaagaaatattaagctttatatgtgtatcctataaagataaacttgtgatgattttgtgctttttttcaaatttgttcatttatgcttataaaaagtaaatacagatttttgtacaacaatatccgcagcacacggacagaaaaatatccctgtgtacgtatacaagacagaagatgtctttgggcaagcttttaaatttgtttatttatagtttatccgatgatttccttacagaaagaaacattttgtaaattgtatcatgtaccgagatagaatacaatgacaggtattgacaaaaatacagaatcaggagaaatggtacaatgacaagatttattgcggattcctgcagtgatatgcttcagatggaaggcgtggattttgtagcggttccgcttacaatttccacagatgtgaaagactatgtggataatgaaaatttagatgtaaagggcatgacggaggatctggcaggctataagggaaaatcatgcacggcctgtcccggggtggaaagctggctgaaggcatttgaaggggctgatgttatttatgtgggaacaatgacaagtactctttccggaacttataattcagcgctggtggcaaaggagatgtatcagcagtcacatccggaagccaggatccatgtttttgatacactgagcgcaggaccggagctgagacttcttatggaaaaattgacggagttggacaaagagggaaaaacgtttgaagacgtggtacggctgggatgcgaatatatgaaaagaaccagactgttttttgcactgaaatctttacataatcttgcgcagaatggaagagtgagcaaagtggttgccgcagccgcaggggtactgggaatcagtgtttttggaacagccagccaggagggaaccctggagccttctgcaaaatgcagaggaagaaaaaaggtagtggaagaatttttaaacgagattacgaagacaggatttcgaaaaggcaaaatacggatcagccatgtagataatctttctcttgcagaaaagatcagagatttggttctggagcgctttcctcaggcagagatccttgtatatgaagccagaggactttgcagctattatgcagagagcggaggcgttctcgtaggagtggaaggaaatctgtaaaaaaataatctgagctgagcagagattctgaagctcttttccggaaacaaaaagactgataaacagtgttcttatgatggaaacattgcttatcagtctctttttatgtattttggaaaagtattatatgactattcaggcgtttttcagagctttttcaagatcagcaagaatatcatcaatatgttcaattcccacagacagtcggatcattcccggagaaacaccggcctcccgcagctgttcatcattcatctgacggtgagtgtggcttgcaggatgaagaaccatagtcttggaggcagcaacatgagtacagatattggcaagttccaggctgtccatgaaacggactgctgcctcgcgtccgccttccagctcgaaggagatcacaccgcaggagccgtttggcagatatttttctgcaagggcatggtatttgtctcccggaagtccgggataaataaccttggaaaccttttcatgtgacgcaaggaattctgctgttttctgtgcattgctgcagtggcgctccatacggagaggaagtgtttccagtccgatattcagaaggaagcagttattaggagaagggatggaaccaagatctctcataagctgagaggttgctttggtgatataggctttttttccaaactgctttgtgtacacaactccgtgataagactcgtccggctgggtaagaccgtggtatttgtcaccgtaggcttcccagtcaaagtttccgctgtcaatgatcgcacctcctacctgaagtccgtgaccatccatatattttgtggtggagtgggtgatgatatcagcgccccattcaaagggacggcagttgatgggggtggcaaaggtattgtcaacaataaggggaactccgtgctggtgagcaacactggcaaatttttcgatatccagaactacaagggccgggttggcaatggtttccgcaaaaagagccttggtgttaggacggaaagcatccgcaatttcctccgcagatgcgtctgtgtccacaaaggtacagtcaatgcccagttttttgaaggtaacagcaagaagattaaaggttccgccgtagatggtggaggcagctaccacgtgatctccggcctcgcagatattaaaaaccgcataaaagtttgcagcctgtccggaagaagtgagaagcgccgcaacaccgccttccagttctgcgattttcgcagcaacagcatcgttggtaggattctgaaggcgggtatagaaatagccctcggctttcaggtcaaaaagctggcccatttcatctgtagtatcgtatttaaaagtggtgctctgataaatcggaagcgcacatggttctcccttggaaggagtgtagcctgcatggaggcatttggtttcaagtctgtaatcgctcatgtttttcagtcctttctgagatgtaaattctgttcgcaggacagtattgcaccgctgtgaacagatgaagaaacaatctggaattatcatagcacaaaaaaggttcagtgacaattagaagggacaaaaaagataggtagttgttggggttaaagatctgtgttaaagtaatcacagcagaacattgcctttatggatgaataccgggcagatgacggtattgcttcagaatggaggcaggagaagcatatggaaaaccattaagataacagaggtgacagaattatggcttataaaatactgatggtggaggatgattcttctattgcggcaggtctgagttatgccttggaaaaagagggatatcttgtaactctgtgcagaaaaatttcccaggcctttgaagaaataaagacagttcattttgatcttgctcttcttgatatgcagcttccggacgggctggggaaagagatcggacagaagcttctggcagaacagacccaggtgatttatctgactgtggtggatgatgaggatgaaattgtccggacgctggaagacggcgcagccgattacattacaaaaccttttcgcatgagggaactgatggtccggatcaaaaggacattgaatataaaaacagaggaacagcaggttatgaggatcggggaagcggtgatcgatgcaaatgcaggaaaggtgtttgtaaaagatcagcagatttcactgacagcgctagaataccgcctgctgcttatttttgcggaaaatcagtcaattctccttacacgggagcagcttttggagcggatctgggatatcagcggtgattttgtggaggataacaccctgaccgtatatgtaaagcgcttgcggaaaaagctgggggatgctgttcagatttcaacagtcagggggatcggatatcgtgtggatcagtaaaaaggaaattctggaactttcagagggaatccagaaagccattgagggagaaagctttgatccaagggatgagaaggaaggtccctggagtatttttaaaaatgatatttatacattgatgaacctggagagggagcagagaagcgccgcggtagaagaaaaagaacatctgtcagaatatttatctgatatttcccatcagctgaaaacaccggtttcctccattttgcttatgactgagcttatggaggatgccccaaaggacaagcagaaagaatttcttttttgcatcaaaaaagaagtacggcatatggagtggctggtaacagcgctgcttaaaatggcaaaaattgattctatgaatgtaaattttcataaggataaggtacaggcaggggagcttctggaccttgcgatggaatccatagaaattatgctggatatccgaaatcagactgtgaggctaaaggaagatataccgcttgtctgtgacaggaaatggacgacagaggctcttatcaatcttttaaaaaacgcttcagagtgttcacaggaaaacagtgaaattctggtggactcaggagaaaatcccatttatcgctggatatctgttacagatcagggaaaggggctgaaaaaagatcagcttgcaggtctgttccgacggttcgagggcactcataaagaaaacggatatggaatcgggctgcctctggctctttccattatgcgggctcaaaatggggaaatcgaagtgcagcccggtatggaaaaagaaggtaccacatttgtgatgaaattttataaatagtcacggaagagtcacttttcttatttatcatgaatatcaaagaggccagataaaagctgtggccggaaaaatgagaaaagaggtaatatatggaagttttggaagtaaaagagctgacaaaaatttacggcagcggagaaaatcaggtgattgctcttgaccatgtgagctttcaagttaaaaaaggtgaatttgttgccattgttggagcgtcaggatcgggaaaatccacccttatgaatctgatcggaggaattgaccgtcctacctccggaagcgttgtgattgacggaaaaaagatttttgacatgaatgaaagtgaaatggctattttcaggcgcagaaatattggtattgtgtatcagttctataatctcatcccaaatctgacagtagatgagaatattatgctgccctgtcttctggaccagagaaagccggatgcagggaagctggagcgaattgtggaaatgacaggattatccaacaggagaaagcaccttccgggacagctttccggcggtcagcagcagagggtatcggttggaagagctcttattaatgatccggcttttattcttgccgatgagcctacaggaaatcttgacagcagatccggaagggaagtgatagagcttcttatggctgccaaccgaaaatccggccagacgctgatactgatcactcacgatgaaaatattgcgctgcaggcaaaccggatccttacgatcagtgatggaagaatcatcagagatgaggtgatccggggatgaatattctgtgcacactggcctgcagccagatcaaacgaaaaaaatccagaactgcgatcaccattgctgcgatcagcttatccacagctcttctcacggcagtgatcaattttgcagtaagcggaaacactatggttcagggatttctgggggaggattatggagagtttggaagcgcctataccctgcttctgctgatcccggcagcgattttgggggctttgatcattgcaatggctgtgatcgtgatctccaatgcttttcgaatgagcgccaatgagagggtggctcagtttggcacactgaaatgtgtgggagctacaaaggagcaggtgtataaaaccataatgtatgaatgtgtgcttctgtgcattgtggcaattcctctgggtgttgtgctgggatatcttctcagctttgtgggaatcggaatttcaaatcagtttatggaagagatgaatactctggtaagaataatgatcaagcaggtgaatttcagcctgtcctttgttttttctccggcagctcttctggtatctgttctgatctctggtattacggtctttgtggcagccatgatcccggcaaaaaaggccatgaaagtatcagcccttgactgtctcagaaacggcggggaaatcaaagggaatctgaatgtccatgcaaaagcacagattaacggaaaaagaagcattgaatatcagcttgcccgtaagaatgttgcatccaatcgaaaacagatgaaatctgcggttatggctttgtctgtcagcatgatcttatttgtttccatgagtggtctcaaggagatcgcggacggggtgcaggaatatatgacgtttgactacggatattctgtggtggctgactattctgcaaatcgtaagtatactaccaatccgaaaacaggtcgagtagaggaacatgcacagacgatcagctcagagcttgcagaggaaatcctgtcagagctttcagaatatgaaggaacagaggtatatggaagtggcgcggattatgcaacttacgatactcctttaagctctgaggagctgactccggaggtgcagaaggctctggaaaaagaaattacagaggagaatggagaactacttctggatgtggagagaatcatactggatgaaaagcattacagagagctgtgtcaacaggcaggcgtggagtacggcggaattttgcttctgaatgattataagtataatgatcacggaacagaaaaacatgttcagcctctgccgtcatccactacttctctgaaactggaaaaagcggatggcagcagccaggaaatagaaattgctgctgttttaagcctggaggagattccggaacggcttctgtacccgaatacaaatccggttcgtattgttgttccaaaaggggaagtaaggggatatacctggatgactacgccggagaatgaaaacggatatatggagtatgccagacaggttctggaatcttattttccgcagaatggcatggattacggagaagccggatatgtcagccgggtatatggcgctgaggactattcaaaatttatgaatattgccattgtgctggcagcattttttatttatgcgtttgtattcctgctgggactggtcggaattttgaatgtgatcagtgcagtcagcttccagatcaggacaagagcaagagagctggcagtgctgaaaagtgtggggattacttcagagtcactggagaaaatgctgaatatagaaagtgttctctgttccggaaaggcgctggttacaggacttccggtgggaattcttcttgttctgatcatgggatactgtgtaaaaatggttttcccgatttcctttcatatgccctggggagccattctgatcgcgattgcagtttcttttggagtgatctggggtacggtgaaggtttctttgaatacattaaaaaaacagaacattatagaaacaatacgaacactttaaggggctgcagtctgacgtattttgatgaaaggttagcaaaataatactgcaaacaacgcagttaatctgagattagctgcgttgcatatacaaatatttatttataatttaccgtataatcgtaatgatttctttatcaagaaattcgtaaaatttagaaatatgtaatccatcgatcagtgcgtgatggcatagtactgatatggggagaagaactttattattctgcataaagtattttccccatgtaatcctgggattactgtctgcgggaactggggtagggttaataagagcagtatatgatatccatgggatagtagatataaaaatcttacctaaaatgtcgtcctcttcttcattaatggaattctgttgtttcgccttttcctgttcctttgcagcataactaatataatcatcaaaagagagattactgtcaaggtcacagtagcaatatgttccatcacttagcgctactgtatgagaggtcaggcaataatcatattctacaatctggttattaagaatcctttgcaacggtgtacaaagggaacattataaaaattaacaatggactaccaatcttacgcagagataccgcccaaacgagactacgggcggtatttttgtagcttggcaagaaaggaggaaccaccccaccggggcctgatgaaaaatcaggccccttttttcatgctcaaaatcaggaggtaaacgtgtatgccagatgataaaaccacaaaaaccccggagacggcagcgccggacaccggaccgggcaagaccccggaacaggcccccgtcaaggagcctgtgaaaaccgaaccgtctatgccggaacagaagcccccggagcaggacgcagacaaagccgcaccgccgaaggataaggagtcccccacttccgagaaggcaggcgcagagaaaagcccgaatgtctccgtctacaacttttcggaaatcatggccgagaagaaagcggcggaaaaagaaaaagcgccggagaaggcagccaccgcaccggataagggaaaggaacctgcaaagcaggacaaggctgtgaagaaagagcctgacaaaacagcggagccgccgaagcgtaggggccgcccgccgaaggaggcgcaggcgaaagctccggcggacaagaaaaaggccgccccgacaaaagaaaccgccgccccgaagaaaacttccatctggaaggaaccggcggacaagaccaccgggggcaaggaaaaggccccgaaggctcctgcccagaaaaatgcggcggataagggttctgccgctgtgaagcctccggccccggaacagccgaagccgcaggagccgcccaaagaagcgccccgccgtggggaggaacagatcgtctatatcaagctgggcgagctccacgcctttaagaaccacccgttccaggtgcgggacgatgaagaaatgcgggcgatggtgtccagcgtcaaggataagggtgtcacccagcctgctatcgtccggccccgggaggacggcggctatgagatcgtctccggccaccgccgccagaaggccagcgagcttgccggatttgcggatatgccctgtatcgtccgcaacctgacggatgatgaagcaatcacgcagatggtggaggacaacttaaaccagcgtgaagaaatcctccccagtgagcgggcaaaggcgctgaaaatgcagcttgaagccatcaagcaccagggctcccgcacttcgggccagattgacccgaaggacgcgggcaaacgctccaacgagattgtagccgagcggaacaagatggcggtcaaacaggtacagcggtatatccggctcaatgagcttgtccctgacctgatggccctcatggacgcaaagaagctgggctttacaactgccgtggagctctcctatatcagcaagaagaaccagaactatatcgccgttgccatcgacagccagcagtcctccccgtcccaggcgcaggcaaagcgcatgagggagctggacgagaagaagctcttaaacggggatgtaatcgacggcattatgatggaggacaagaaggaggtagacaaagtgattttgacgggcgctgaactgagcaaatacttcgggaaggaaaccaccccgagggaaatgaaggaccagatcatcaagctgctggacgactggaaaggccagcagaaggaacacgagaagccggagaagaaaaccgagaaggagaaataagcgggacttcgggccatgctggcccgaggacacaagacctgtggggctctgccccacgccccgaagctctggagatataaattattccccgtcgccagttattccgtagcatagccgggaaaatcagttcaagggcagagccgccgcaggcggtgccaaaggcacccttgacggatttctcccggttatgctttatcacagtcaagcgacggggatataaattctccagagccgtcccccttcccgggggaaggggcggaggggttgggcgtaccttgctttaccttatttaataagtgaaatggagggaaccagaaatgaagcgacctttagcatacatcaccgccgcatggtgtggtattcccgaggtggacaccgaccttgccgtggagttctgccgggcagcctatgaagcgggccttgcccctatctgcccgaagctgtaccttccgctgatcctcaatgacagcgtgccgaaggaacacaaggacggtatcgacatgggccgggatatgctcaaacgctcccgtatgcttcttgtctgcggcgggactgtggacgaggacgtgaaaaatgatattgcggttgccgcccggtatgggattgcggcgaccacgctggaaggcattatgaacgtgaaggggcagggttccccggacagtgccggatattaagctggggagcctctttgacgggataggggtctttccacttgcggcctcccggtgcggtatccgtccggtgtgggccagcgagattgaaaaggcccctatttccattacgaaaaggcacttcccggaaatggaacacctgggggacattacgaagatagacggcgggaaaatcgagcctgtccatgtgctgaccttcggctccccctgtcagaacctttcactgatcggcaaccgctccggccttgccggggcaaaatcaagcctgttctatcaggctttccgtatcgtacatgaaatgagggatgccactgataacctatatccagttatccttgtttgggaaaacgtcatgggagcgttttctacaaatgaccggatggattttagagccgtcctatccgccttcgcagacaccgaagttccaatgcctccttcgggaagatggggaaacgccggaatggtgcgagggggaacgcctgatgtgtcctggcggctcatggacgcccagtattgggcaggaacccggaggctggcaagaaggcagcggatttttgtcgtggccgattttggagggcggcgttctgccgaaatactttttaagccccgtccaatgctcccacttcctgcgccttgcggaacgggcggggacgcctcccccgaaggagatcgagcgccttttattgaaacagggcggcgaataccagtcgtccgaccctttcagtgcttccgtatgcggggcgcagcaaaaaggcaggaaggggcggccttccgaaacagcttcggtttaccaactgacccttttcccactcttttagccagcgatgtgacgcccttctccttctggtatgaggatgatccggagggcggctgtatccgttttgtgacggagacggaaagcgagcggctcatggggctgccggagggatggacaaggtacggggcagacggcgaagaaatccgttcttccagccgctacaaggcgctggggaacgctatcgcccttccctgtgccgattacatcatggccgggatatatgaggcgctgaccggcggggacggaaaggaggaaaatccccatgtttgaagcctatatcacaaacgccgccctttatcccgaggccggggtggaggtcggaacaaccttgaaattcccggccaccacgcaggagattcaggacgcccttgcgaagatcgggattgacggaaagcagtacaccgaggttttctttaccagctttgacagtgacgacgtgctggggctgtatgattatctctatgaatacgctggcattgacgagctcaacgagctggcgcacaccctgcttggagtacgggataagggtgagctggaaaaatacgaagccgctcttgtcttaggaaagcacacggaaagcgtgaaggaccttatcaatctggcccagaaccttgacctgtaccgcttctacccggatatatccaatgaggaagaactgggccgcctgtatgcggacgagtttcacgccattgagatacccgagcatatcgagaactatttcgattatgaggcatacgggcgggacgtgcagatcagggaaaacggcgtgttcgccccccggcggctatgtggccgctgctcccggcgcatttatcgaatattaccacggcccggaggacattccgaaggaacaccgggttttcgcctacccgaaggaggctgaaccggcccgctccatcttaaaagccatcctggaatttcaagaagccccgcctgctccgagaagggataaggcggggccttcccatgaggaacgataagacttcgggccatgatggcccgaagcgcaaggaggtgtgaaccgattaagtattatcccatcaatgaaactgccgcccggcgcgcaaaggaaatgaacagcttttccgactaccgggaagggagcgcaacggcggaataccgggcaatggtcgataaggccgccgccgtggcggaacaccagaaagcaagggttgaccccatgtaccatgagaagatcgaccatctgctggacacctacgcccggaaactggccgagaacatgaaccagggctttgccattgacgcaagagtgccctccgtaatgattgcggggcctgccaatttcccggtccggcagaaagaaaagcagaaccgggcaagggacggcaacatggaggaatggcggtatattcaagggctgctggataagatacgcagtaccggcatgggcggtatcagcgccgacgatccggcagcggtagaaaagctccaaaagaagctggactctctggaacgctcccagctcattatgaaggaagtcaatgcctactaccggaaacacgggacgctggacggttgcgccctgctgtcccctgaccatatcgagcggctgaaatccgacatggcggcaagctggcggagttccccgaagccctttgagagctaccagctcaccaacaacaatgcggagatccgccgtgtcaaagcccgtatcgaggaactttccaaacgggcggagcagaccttttccggctgggagtttgacggcggccatgtggagatgaaccgggaggacaaccgcttgcaggtattctttgacggcaagccggacgccgacacccgggcagaactgaaaagcagcgggttccgctgggctcccagtgtgggcgcatggcagcggcagcttaccgacaatgccatccgggccgctgaccgtctggaatgtatcaggcccttgtcgggagaaaagccctcccagcttcaaaaaaagccgtctatcttacaggccatgcgggaacagagcgaaaaagtgaaggcggagcccccgaaggaggctccggccaaaaatgccgagcgttagacctcgggccaatatggcccgaggtcttctgctccctgtacacgcgagggggcctcccgtcctgcgggagccctgacggaaaggaggttgtatgcaggaagaagtcaaccagaaaacaatggccctttcaatccgggcctcaaaactgacgggaaaagtgctggccgccgctttctcgaaagtcgtgcgggcggcgaaagcccaccaccagaaggcgctgaccccgaagggccgccagagtgtgaaaaagctgatgaaccactacggggcaaaaaattccatgccctatgtgggagccccgaaggactttgaccggattgcaaaggaatttcatgtggactacgccttccacaaggtaagccccggccactacctgctgtttttcaaggccgggcaggcggacgccatcacggcggccctccagaaatacagcgaaaaggtgctccacaagggcaaggaacagccctccatcctcggccagcttcggaaattcacggagcttatcaaggcgaagccgaaggagaagcagcgcgccagagaggcggtgaaggacggacgttgagtgacaaaatccgaaaatatgtactcccgaacctgccgtatctctttgtgttctggttcttctcaaagctggggacggcctaccgtatcgcccccggcgcggacttcggcacaaagctcatggggatgatggacaccttcccggtggcctttgaaacctactggccggggcttggcggccttgacctgcttgtagggattgccggagccgccgggatgtacttctttatccagtccaaaatcaagaaggaaaagaaattccgccgggacgccgagtacggcaccgcccggtggggcacgccggaggacattaaaccattcgttgacccgaaattccagaacaacgtcattctgacgggaacggaatttctcaccatgaacacccgcccgaaaatcccggccaatgcccggaacctgaacgcctgtgtgatcggctcgtccggttcgggcaagacccgcttctggctcacgccccagctccttcaagctcacagctcctatgtgtgcgtggacccgaagggcgggaccctcgaccagtgcgggcggttcttgcagaggcagggctataaggtacgggtgttcaacagcatagatttttcaaaatccatgcactacaatcgtgcgacttgttcgtcgctgaaaaggcggcgcacagcgctgtttttaatcagttctgtgaactgataattcgagaggtggaatgatagggtaacgccttgaaacgcctcccctgatactccggcatgcgtcatcactctgtgatgaggtgtgaagcccggtaaagtcggcagaaaggtgccgtaacagataacgctgacgaaacctgtccagaggtggacagcgcaccccatatgccgggggtctataaaatacctaaggtgagaatggcagcaatgcctgacgaaactcccgaatgtaaaggtctaaaagtgccacatacagaaatgtatgtgtgggttcatgcccagacagtgcggtctagtaggaatggttgttacgaaccaccgtgatgtgttacaggcacatgcaagctgtcaggcttagagggaacacctaagggtatatatgcacagatagaattatcggaacaaggaaaggcagagagtcctatggataatccggcgaagaacaataagcggatgaatctctgctgaaaggtcgtggtcgaactgtcgatgttgcctgcgaaaaagagggcgacggaggaatggccacaagtcaggcagaaaatcagcagtacacactctctaatcatgcagtcgagtaagaataagaaattgtcactcgaatcaatgaaatggggtgatgtacatgacacaaaaagctaaaaaaagaagcaaactgcgccatgcggaatactacgacatgcagaacatctttgatgaactgtatgcaaaaagcaaagatggagaaatattcaataatctcgtggaaatcattgcggcgccaaataacatcatgcttgctttcagaaatattaaaagcaatgatgggagccataccgccggcacagatgggagaacgatagaatccctggcagatatgtcagaagaagatttcgtctctcttattcaaaaacagtttacaaggtatgtgccaaaaacagtaaggagggtagagattcccaaaccaaacgggaaatttagaccgttgggtataccgtgtatcatagacaggattgtacagcaatgtatattgcaggtcatggagccaatctgcgaagcaaagttttatgaacattcatacggcttcagaccttgcaggagtgctgaaaacgctgtctcctacgcttacggactggctcaaaggaataagctccactatgtggtagacgtggatataaagggtttctttgacaacgtaaatcatagaaagctgttacaacagatatggacgctgggtatacgggataccaaactgattcagataatcaaagcaatgctgaaagcgccaattcaaatgccagatggagaaatcttatatccagacaggggaacccctcagggcggcatactttccccgctgttagccaacattgtcctgaacgaactggactggtggatagcgtcacagtgggagggtatggcagaccatatgaagtctccttgtaaggtcacatattatccgaatggggcagagaaaaagtgcaacagctacacggcgctcaaaaagagtgttgtggtcaagcatttttgtaacacttgtggctaaaaaaatatcataaatcaattatgctgcattccgtgtttcaaaaggggtgcgataaccattgaaactatggggacgcacatgattgtaggcaacatatgcgaattcctcgacagtctgataaagcgcttcttccgtagtgaattcatacaagtttgtgcactcatttttcaatgtgttgaaataacgctccatcggtgcgttgtcatatgggtaacctgctttgctcatgctttgcgtcacatttaccgattcacagaattcggtaaatgctttcgacgtatattgtgttccctgatcagaatgcaggattatcccttctttgatagatggttgtgatcctaacgcctttttcagcgtgcggacagcaaggtcactggtgatattccggtctgtgatactcgcgatcacgctgcggtcataaagatccaggatcgtgcagttatacctcacctcatggttctttaaaaacagatatgtaaaatccgtacaccatttttgattcggtttttctgcagtaaaatcctgatgaagcatgttatcaaacactttatgcggtttggcatgtccgcaaaccggctttttaggacgtacaatggaaaataatttcatctctgtattcatgtatttatgaatggttgttgggctgtagcgatatccttggcgtgccagataaactgtcatgctccggtatccatccacacctctgtgctcatggtaaatctcccggatttttgcctgtacctctgatttttgggtatcataatccgccttccggtgtttccggtagttataataagcatttgggcagatgtcaagccgcctgagcagccagcgcaagccaaaatagtcatggtatttttcaataaaccgataagcctctaatcgatttcttttgcaaagaatgccgccgctttttttaagaaaagattctcctttcgtgattcttcaagctctttccgaagacggagattctctttcatcaactcagcttcatttggggattctggatttaaaatggcttttgtctggcattcttcgctaaattcagcacaccatttagagatactggcttttgatacaccatactcagcggtgatgcttttgtaagtacgtccttcttccagatggagacggacaattttctttttaaattcaggtgtgtaagtttgtggcataatagttcctcttttctttctgagatgattatatcttattagccactactgttacaactttattatagcactacagagcaatctcaaggaaatgcgtatagtccggtatgcagatgattttaaaatcttttgcaggaaccgtaaggacgctgacagagcataccatgcggttaaggactggctgctaaagcggctcaaactggaaatttctgatgaaaagtcaaaggtcacaaatctcaggaaaagagacagtgaatttctggggttccgtatgaagctgataaggaaacgcaggacatgggtaatcagttcaaatgtctgtgacaaggcaatgtcgcatatgcagaaagaactctcaaaagcaattatagagattcaaaacagcaagacagcaagtaatataaagagcaacattcacgaatacaacgccaaagtcataggtatgcagaactattattgcattgctacgaggataaatctgaatttcagccgaatggctcatgtgaataacggtcgttttctccatcggatagatggatataaaaagcagggcgagctaaacaacaaatatttaaaaaaccggtatggaaaatcgaagcaaatgcgctggattggagatacaccagtagtacctctggcatatgtgcagtttaaaataccaatgcgcaagagcaggaaaatcaatccatatactccggacggaagaatggaaatccacagcaatctgaaactgaatgttgaagatatgctctggctcatgcgccacccggtaataggagaaacggtacagttcaatgataaccgaatctctctctatgccgggcaggaaggtaaatgtgcaatcactggggaacaactggaagtgattcactgtatttgttacaggaaatcaaatgagtgtaaaaatggcagagacagttaccgtaatctgttgcttttatcgcctgccggatatgaatttatctcaacaacagacagtataaagttcgctacactgacaaagaagtatgaattgaataaggcacaaattactaaggtaaacaaactgcgtgttaccgcagggttggcagaaatgtcaatgtaaatcgtaacaaactgatttagctaatgtgaaaaagtgagtgtgtatcactgctgaaactatgcttgatggggcgccggatgcggtgaaagtcgcatgtccggtgctagccgggggaaaagctggagataacatcaaaggcttacctatcggaaccgctggcctacatcaagacggaaagcgacgtcctgaaattcgtcaacgccctgatcgccaataccaaaggcgacgggaaagagggggacgagttctggaccaaagccgaaacgcttctgtactgcgcccttgtggcctatatcgtttttgaggggccggaggaagaacgcaacatgaatacgctggtagaaatgataaacagcatggaagtccgggaggacgacgaaaccttcaaaaacgccgtggactatatgtttgacggcttggagaagcggagcccccagcacttcgccgtaaggcagtacaaaaaatacaagctcgccagcggtgttataagcttgaagagacttcttaatcactattttttaaagaattggagctccaacgtgattaaaaagtctcttgaggcttatttttttaccttaaagaacaaaattgtattttgtaaaaaacaattttaaagcatgtccgtattttgtttcgtcagtacagagattgtgtaaggaactttaaaaagatgacacgaaatcaaaaaaatgcagtaagagggctgtaaaaagacctctgagcatttcgtttagtgtaaagaacttttttacttcttacacgaactttgaaaacgaaacagcctgcccgtagtgataccagaactgaataggcattcagcgtgtcttttctggttaatacgtcccggaaacatcagcacccggtacaggaacggatatgggatgagaacaggaatttaataaacgaaggaaggaggacatctgactatgacagagaaacagggattcatgacagcgttgtatgaacgtcttagtcgtgatgatgaattaaacggagaatccaacagtatttcgaatcagaagaaactgctggaacaatatgcaaaagaacatggatttaccaatcttgttcattttactgatgacggtatctccggcacaagatttgatcgtccaggctttcttgcaatgatgaaagaagtagagtcagggaaagtcggaacgatcctgattaaagatatgagccgaatgggaagagattatctgaaagtcggacaatatatggaattgctgcgacagaggaatgtccgtctgattgcagtcaacgaaaatgtagacagcttccgggaggacgatgattttactccattccgaaatatcatgaatgaatggtatgcaagggataccagtaaaaagataaaatccactttcaaggcgaaagggaaatccggtaagcatgtggcaagtacaacaccgtatgggtatctgaaagacaaggatgatccgaatgtatggatcgttgatgaagaagcagctgtagttgtacggagaatctttcacatgacaatggatggatacggaccatatcagattgctagggcactgaaagaggataaggtcgagataccagcggttcatatggcaaagaaagatgccggattatggaaaggcagagtagaagaaatcaaagatccttatggctggggctcttctactgttgcaggtattctaaagaaaagagagtatcttggtcatacagtgaacttcaagaccagaaagcatttcaaggataagaaaagccattatgtatctgaggataactggacagtgtttgagaacacgcaggaagcaatcatagatcaggaaacttttgacaatgtgcagagaatccgaagcaatgtgagaagatatccagatggatggggagaagcccacccactgacaggtctgatgtattgtgcagactgcggttccaaaatgtatgtccatcgggtgaataatggcaagcgagtgccacaatatacctgttcggcatattctaaagttccggttggaacgctctgccagacacagcacagaatcaatgctgatgtggtcatggaactgattagggaacttttaaaggctgttgcggaatattctcagcttaacagggaagagttcatagaaacggtaaaaaaggcacagacttcacagcagtccagtgaaattacacgattaaaaagcagactatcggaagcaaaaaagcgtgtgcaggaactggaaaaactgatttgccggatttatgaggataacattcttggcaagctgccagatgaacgctatgcgattctggatgggcagtattccaaagaacagaaagagttatccgcagagatcgcagatatggaagcagagttatccagttatgaggaaggtcgcaggtcagcggagaagtttatttcactggttgataaataccagaatttcgatgaactgaccacctatatgctgaatgaatttgttgaaaagattgtggtgcatgagcgtgaccggaaaggaagcgttgagacaacacaggaagtggaaatctattttaacttcattggcagatatttaccgccacattttggtgaggtagaaatgacaccggaggaaattgaagaaatgaagaaacgggaagccagaaaagacaggcttcaccagaattatctgaaaagaaaagcaaatggaaaacagcaggaatattatgaacggacaaaggcaaaaaagaaagcggagatggatgctaaaaaagaagaaatccggcaggaagatattgcaaaaggtgtgttcattccagtatcactgcttccacctgcagaaccgaagaaaggagttgcatcagcatgagcaaattagaaagaatcattcacgatgacagtaatggtctggattatatccttgtcggggaaatctacctgccattgatcgcagtgccggaagaaagaagagagatcggtttttatggaagtctccacagaaattatctgaaagactataagagcggattgtattcctatctgacattgagcggaaaactctggacttaccttgcagatctgaatgagcggtgtatggaacgcacggatcttctcatggatcaaatgatggaacaggaaggcattacagaagaattgaaaagtagagaccagatggaatgggttcgccgggcaaacaatgtaagaagccggatagatgaaattattttaaatgaactggtgtatgtgtaggaggggcttatgagatatcggattgaatatgcagatggaagatgctgtaattttgcaaacagcagaaaagatttgttggattggctgaaagcattaaaagatgaaaaaattgttgatatccgtaaagtatataaaaatggtgttacggattctgtcatggataactaccgcaagtatctggaaaaatagttaagaagttagcaggtaaaaatatagattacgagattatcctgtgatatactttaagaacaaatctgtgaatagaaagcatagtgttagatggttccggttgtgcgtggagattacatttttcatatacagccgaaagtttgataaggagcaagagaatgagtgatttaaaaggaatagagtataaacgatttgaagatatcaagcatatccgggaagatggaagcgagtattggagtgcgagagaattgggaccggcacttgattatgcaaaatgggagaattttgcaaaagtaattaaaagagcaatgatcgcatgtgaaaacagcgggcacagtattccagacgattttcctgaggtcaggaaaatcgttgaagctggagtcaccacgaaaccaaaaaaagattatgaactgtcaagatatgcatgttatctgatcgttcagaatggagatccgagaaaagaggtcattgcattaggacaaacatattttgcaatccagacatacaggcaggaagttgctgaccattttaatgaactggacgaagataacagaagacttgttgttaggggagatatcaaacagtggaatcaaatgttggcagagacagcacataatgcaggagttattacgaatgaggaatttgcaatttttcaaaatgccggatatatgggactatacggtggattagatgttgatgacattcatacgaaaaaacaattagaagtaggacagaaaattcttgattacatgggaagtacagaattgattgctaatctgttccgaatatcacagacagaagaaaaattaagaaaagataaaattgtcggtgcggaaaccgcaacatcagtgcattataatgttggaaaagaggtaagaactgcgattgaaaagattggaggaactatgccggaagatttgccaacaccggaaaaaagcatccagcagatagaaaaagaacagatgcagagattaaaaaataaggctaagaaaggcaagttgatgttggacgaataatttaatagtattaacgcaaaagggcattaaccgtaaaaagttagtgccttttgttttgctcattattaaaaatggactgtatgagccagtcggaaaaaatgaataatgaccgattaggtcaaaagattgagccgatgtatttggacttttgtaaaagttgaaattgcgtcggcttttttattttcacaaaatccgaaatagaggatttttgaaaaacaggcagaacgtaaaacatgccgaagggacagcggcagaagtttcgttttgtctgccgggagtacagaggactggaagtcctttgtgcctggattgcaaagggaggcagcaccttgctggggttaaggggcgaagcccttagcaggttaagggcggcagccattgcccagtgatatggcgtttcgccatatggtactgggtactatctgtaacggcgacagagcctttaagcagcttcgctgcaatctcttcggggaaacaacttgagagaaaggagaaaagtgaaatgaaaggaacaaggcataacggcagatctggaaaaaatggagtttacaatccgcttcataatgatcgcagatttaatacggaacacagtgagcatatcgacaatgaaagagtccggcaaaatatttactgggactgctatcagggatataccacaatggaagatcagggaaaagagaataattcttcttttgaacaaattgagctggcattctatgaagagcattatggaaattatgttatgaagcaaaatgagagacatgtgaaagccagacacccagacagatgcaaagaagtggaagatgtttggaaaaacaaaaagacctgtccggaagaaagtatctatcaacttggaacaatagatgaacacgcttccgtggaaaccctgattttagtatttgatgaatttaagaaagaattcgatgagcggtttggctctaacgtgcatattattgattggtcgctgcacatggacgaagcaacacctcatattcatgagcgccatgtttttgatgctacaaaccgatatggagaaattgagccgaaacaggaaacagcattggaagaacttggatttgaacttccagatccggaaaagaagagatcaaagacaaataaccgcaaggttgtttttgattctgcctgtcggacaatgtttttagatatctgtaagcgtcatggtttagaactggatgaggagccagcttatggtggacgagcatatttggagaaacaggattttattcgaatgaaacagaaagaagagattgcccatcaagacaatatgattgaagagcagagaaaacgagtaaatgaaaatatcctgcaaatagttcagcagacaaggacggttcagaaaaatgacaaaacgattcagaaacaggaagagaagattgcccaacaggacaaagagtttgctgataattcgaatcgtattttcaaacagggggatctaatagaagaacagaaaaaccagttagagaagcttactcttgagattgatgatattgaatctttactgcaggatgtttcagatgttgcttatgagaaagctgtggaagaagtcacaaatgaagtaatgattaaaacccggcaagatgacattcaacttattgaaggcacaaagaactggatcgaccagccacaacgaaaagcttcggagaaagaaaagaattatgcaaaaaatcgtttggatggcgtaataaaaaaaatcatgaaagctatgacggcagttcaaacagtaaaagattcgttactgcagccaaaaacaaaagttaaggttgtaaatgaaattaaagaaaaagccagaccgtcgatcatgaaccgtctggcagaaaagaaaaaagagctggcagaaagagaagcaaataaaaagaatgatttgaaaaaatcatggaacagagatgacagataaagggcattccgttgtattcgttattgaatcaatgcgagtgctttttgttttctcggaaaggagcaggtatgaaattatttgaagctgtaaaggaagctgttactgcaagaaatgctgcagaatattatggaatcaaagttggacgaaacggaatggctgtctgcccgttccatccggacaagaatccaagcatgaagcttgataaaagatatcattgttttgcctgtcaggcagatggagatgtgattgattttgtcgctaaatatttcaatctttctgtgaaagagtcagctgaaaaactggcagaggatttttctgtaccttatgaaaaataccagagttataacaagacgaaagattatcaaaaaccaaaacaaaagaaacagacactggatcaattctttcacgagcaacagattcgtttttttcgagtatacagtgactacttccatcttttaaagaaatggaaagttgattatgctcccagaatcgaagatgatgattggcatccgttatttgttgaagcgatggaaaaatatacgcttattgaatataagatggatgtgctactcagtggttcgctagaagatcgtgcaagattgattttggattgtcaggaggaggtaaagaacattgagcaacgaattaaggaagaatctgccggacgatgtggttgcacgtctggaagcattacaaaaagttgaagaagtaaccgaagagacacaggtggaaaagaatttgcccagaatggaactgccaatctggttcgatggcaaacagatcaatgaaatccttctgtatcagacaattctgcagcaacatgaaatcaagtgtatcaatggaatattgtatgatatagaccgttcaatcccaaacgatgaaatggagaaagagattctggatattatagaacactattggaccagcggaatttcagccaaagtaatggctattttaagtggatttaagatgtatacccgttcagatccgcttcccataaaagaggatagggttcattttaagaacggaacctattttgtaaatcagaagtttattaatcagaaagaatggacgcaaaaccgattgacggtcaattataacaaggatacacctaaacctgaaaaatggctgacattccttgacggactgctcgaagcggatgatattgtctgcctgcaggagtttatgggatattgtctcattcccagcaatagaggtcagaagatgttgctgattatcggaaaaggcggtgaaggaaaaagccgtattggcagaatcttaaaaagaatatttggtcataacatgaattcgggaagccttcagaaactggaaaccgataaatttgccagagccgatcaggaaggcaagctgttgtatctggatgatgatatgaaaacagaagcattaccatcgactaatgtgattaaagcaattgtcacagctgaggacgaaatggatttagagaaaaaaaacaaacaaagctatcagggacttcttgtttgcagaatactggcatttggaaacggcacattaaagtcgctttttgacaggagtcaaggtttttacagacgtcagattatcctggaaacaaaagatgtaccgccggatagaatcaatgatccctatttggcagacaagatgatggaagaagtggaaggcatagttctatggtgcattgagggcttggagagactgatccgtaacgattatcagtttacgatcagtaataaatcccagttattgatggatgaaatgcgggaggatgatgacaatatcctatcgtttctggaatcaactggatatatcggactggaaaaaggcactcatgccacgtcaaaagatttatatgttgcttattgcagatggtgcaatgataacttggatgtacctgtaagcgaaagatcctttgcaaggagattcaaggagaggtcagctgattatggaatgacttatgataagaatatctcagtaggaaacggtcgtttttgccggggatttcgtggtgtccatgtcaaggtgaggacgaaagacgtcaattattgatccggctggaaaagacattaggcactagaaaagcctgaaatatatcctgcttaaatatatgggctttataagtatatgtttttttcttattaatttaaaaataaagtgcctaagtgcctaaagcatgataaacactgggaaaacaggtatttctaagtgcctatttaatgcctataaagtgcctgaaaataacctttaagcgcctactccttgtcgggcttctcagtataacaacacgatagaagcatacgttgtacttatcgtcttgtctggcagggaagaatattaggcattaatcagagatatcggcagagaaaacagaagtgatagacaatgatatttgttaggtatgcttcttgttgttggctgcatcatattaaaacgctttttacgataaaaaagtgctgtgatcacaaggctttttgcaagcaaaaatgaaaaggctatatataggtagcctacgaaactggaagtgcccattttgggcctgattgaaagaataatgttctgacagagaccaatggaatgactctctgctggggctccaaaagaaaggaaaaatgattatggaaaaaatgatgaatacaaaaacagagggtaacacatttacaaagaaaatcgggcagacagtctatgttgtccgttatcatttcaatgaaaatgcaaaggaaacaatgcaggagaagattaaccggatgctggttacagaagcaagtcgacaggcagtgtattaaaattaggtggatgtaattgaagaaaaaatatgatatcatgtgagtaacaaatcgggattgaccgaactgaaggtgaagaatgcttcttgtctaaagggcaagaagatggggattagaaagtgttttttacaaggaggtgattaggtgaatgatcaattcatacaaggagtaatatttgattgggataaaattgataaggatagttatctgaagggaatcagggcttttaaggaagttgaaaaacttgattttaacaaaccaattactttttttgtaggggaaaatggcagcggtaaatcaactttattggaagcacttgccgtagcacatggttttaatcctgagggtggaacgaagaattatgttttttctacgcatgatacacattcagagttgtgtgatgcgataagaattgccaaaggctatcggaaggaaaagtggggatattttcttagggcagaaagcttttataatgttgcaacgcaggaagaagaatatgcagatattacacatccttccgctaaatatcatgaaaaatcacatggagagagttttctcgcattagcacagaataatatgaatccaaatggcttgtatctttttgacgagccggaagctgcattatcgccgcagagacagcttacattgttgatgcaaatatacagatgtgcaaaagagggagcacagtttattatagttacgcattcgccaattttgttaggaataccagatgcagatatctattgttttgataatggacgcatacatctgtgcgaatatgaggatacagagagttaccaggtaacagaaatgtttataaataataggcagatgctgttggatagattactaacagattagataataaagaaatcgattaattctttaggttagaatcgatgatggggtaaacgaaaaagcagttttggcattccagtgaactgccccttcgtttacaccattttcgatttgacctaattgaacaaagtgagcgtccgggtagctactacctatggactttcaatcttttgttcttacccatgattatacaggagttcctgtgcagaagctacagaaatcaagtgttttcagataaattaggtacgacaacaaaacctcaagctttgaggctttagaaaatgtatgaaagaataagattttaacatctttgtggtattcgaagctgtggttttccaagatgcccaccacaggatttacacacacaaatatttatttcataaagctgttttaatatttccggcatctccttacctcgaagcttcgagagatacttttggcatccaaggagattccggcataaagtaagcttcttgtgtttgctacgggaacaaagaagtccgtaatgccgaatcctgacaaaacgttttggcggtacatgcatcagaaaccgtcgtataaattcaacaccggaaagggtcagttctttccattgtcctttgttccggtaatcttttacagaaaaagtaacgttttcatcgtccatacagatgatgcggtgattgctgatggcaatcctatgggtatactttccaaggtagtcaatcacagactgtgcgccgttaaaagttttcttacaataaggaatccattccgcatcataacagaaatcaatcagttctttgaacacataatggttactgtatttttcggcagttccatgaaacttaagttgattcgtattccagagatttttcaactcatccatatattttccacgaaagactttggagatagcccatataggaagaaaaaactcagtaccgttgtctttccattcgtttttggatgtcagaccaccgccgagcagtattgtatggatatggggatgaaagttcatttcagatccccatgtatgcaggatgcagatatagccgacagcagcaccaaggtgctttgggtcagcagtcagttcactgattgtagcagaagctgcatgatacagggtgtcatataacagtttctgattattgtaaatgattggattcagaatgtcaggaactgtaaataccaagtggaagtagggtgcatcaagcacatcctctttgcgggcatccatccacatttcctttggaacagcctgacacatgggacaacaacggttgcggcaggaattatagtgaatctgaacagcaccacagtcttcacatacactgacgtttgcaccataggctccggttttgcagttcaagatgttccgggcaacttttgcctgttccgtagaaggagaatacttttcaaggtatgccggataaaaacaccggaaaatatcctgaacggtgggcttattcataatcagcaccttctttcctgtcaaagggactttggattcccatgagggatttgttgctgacatgaagataaacttccgtggattttgggtcacggtgtccaagcagtgcctgaatattctgccgttctactccctgctccatcagatgagttgcaaagctatgacggagacagtgtggagttgctttctttggaagttcagcatcggatactgcccgtcgcatcacttgctccagtgtactgactgtcaggtaattaccagtaaatttattaggaaacaggatcccacggggacgtcctttctcaaaccagtattgtgtaaggatatccagacaccgtttagaaagaattgtatagcgatccatcctgttcttcgtatcccggacatggatctgcatatttgaacgggaaatatcatcataatgaaggtggatcacttcagaaacccgcatcccggaagaatacatcgttgcaaacatggctctatatttgatatcatcaacagcttctaatagacggtctatttcatcaacagtcagtacggtcggaagcttgtgttccagaatcatacgtggaactgtgatatcatcccaaaggatatgcaggacattccgatagaaaaaacggatagccgaattataaaggttcagagttgtggctcttagtccttcctcttttttggcaagcaaaaaatttctgacatcctggcaggtaagttcttcagggggcttcgcttgatatttcagaaagtaagaaacatagtttttatagcagttgatggaacgctctttgaggttacggatgttagtgatttcatgagctgtcaccagattgctcacatcagttgacgctcacttgcttaactttctgtcaccagtcagttaggcaataccgcctgtttccaggcggtacctgctttatgaagttaccatcccaagcatctcgtgttccacaacgaatttgatcatataatcatcgatcaatcgtttctgattttgaaacgcatacatcagagctttttcacagacacggttgatcatccgtgggattcctgcagatgccttatggatctcatccaatgccttggttgtaaatatttcctgcccgcatccggagtaatccatgtggcttgcgatatattgttctgtttcagaacggtcaagatgaggcagcgtacagtacatgtcaatgcgctgccggatggcggcataccgctgtagctttagtttattttcccacagttctgtctgcccaactaaaacaagagccatgggactcatggaatcaaaccggtaattgagcaaaaagcggaattcttccagcgtctccttctctaacaggtgggcttcatccaggatgcagacaacctttttacgctgtacgccccggattacctcgatctcctgttgcagttggcgctttgaatcaccgcggtagaaacgggattccagccccaactgatccagcagacctttatagaaccaccttggggtcagttttgagtctgacagataaaggatgatgtaatcctcttttggaagttccgaataaaaccggcggataagcgttgactttccacaccctgaatcagctgttacaacagcaaacatctggcggtccgccacataagccagacggccgagagtttcccggaaagcattggattcgaacagtttttcaggagggacatcccggacaaacggtgtatgttccatgccaaagaatgattcatacattagtcattcgcctccttcctgtaagatgcaaatgaaatcgcatctgccatcttgtagtgctataataaagttgtaacagtagtggctaataagatataatcatctcagaaagaaaagaggaactattatgccacaaacttacacacctgaatttaaaaagaaaattgtccgtctccatctggaagaaggacgtacttacaaaagcatcaccgctgagtatggtgtatcaaaagccagtatctctaaatggtgtgctgaatttagcgaagaatgccagacaaaagccattttaaatccagaatccccaaatgaagctgagttgatgaaagagaatctccgtcttcggaaagagcttgaagaatcacgaaaggagaatcttttcttaaaaaaagcggcggcattctttgcaaaagaaatcgattagaggcttatcggtttattgaaaaataccatgactattttggcttgcgctggctgctcaggcggcttgacatctgcccaaatgcttattataactaccggaaacaccggaaggcggattatgatacccaaaaatcagaggtacaggcaaaaatccgggagatttaccatgagcacagaggtgtggatggataccggagcatgacagtttatctggcacgccaaggatatcgctacagcccaacaaccattcataaatacatgaatacagagatgaaattattttccattgtacgtcctaaaaagccggtttgcggacatgccaaaccgcataaagtgtttgataacatgcttcatcaggattttactgcagaaaaaccgaatcaaaaatggtgtacggattttacatatctgtttttaaagaaccatgaggtgaggtataactgcacgatcctggatctttatgaccgcagcgtgatcgcgagtatcacagaccggaatatcaccagtgaccttgctgtccgcacgctgaaaaaggcgttaggatcacaaccatctatcaaagaagggataatcctgcattctgatcagggaacacaatatacgtcgaaagcatttaccgaattctgtgaatcggtaaatgtgacgcaaagcatgagcaaagcaggttacccatatgacaacgcaccgatggagcgttatttcaacacattgaaaaatgagtgcacaaacttgtatgaattcactacggaagaagcgctttatcagactgtcgaggaattcgcatatgttgcctacaatcatgtgcgtccccatagtttcaatggttatcgcaccccttttgaaacacggaatgcagcataattgatttatgatatttttttagccacaagtgttacaaaaatgcttgaccacaacatctggtacttactctgtgtatatttcgtttccagcgcatccagaaaacgggaagttgtcggcacttgtccctgcatggcagccggaagtgctgcctgcctgtcgcaatacggtccaatctttacaggacttgcctgaaaaggttcaaatccgggataggaaacggtgatgatctcaggatttgccggatcataggagatttccaccgtatatccgatcagggcaggtttggtttcatacctttgcccacggaaactgatacaggcacctttatccacttttcgctgctcatggtgcaggaaagcttcggctacaacggctgtatccaaaaaagtcagtggacggctgtcccggttccattcctgcagtggtgatatcccttcttccggaatggcagcaccgaggctttcatagtattctgcaatgccatcatgctttttcttgtggtaatactcatccaggcagattgcccacaaacggttcagttcctccagtgttttgatatttttcagctttgcttcccggataaaagcatctaccacctgatggaacttttcgattttccctttacttttgccggatcttggttttgcatacatcacacggatgcccagccttgcaagggaagaacggatctgttttgcgatatactgtgttccattatcaaagtaacaggaatcgaagattccataccgggaaatcgcttggtgaaacgtatcttcaatgattgattctccctgattgtcataaaaccgggatgataggagatacctggaatggtcatcgattgctgaggacaggtaagtctgtaccttagccccatttcttccgattggaagcttgggtccatacttgatgtccgcctggatcagcatcatacggtgcggtttgcaaaagcgtttggaagaactgtttcttgcatcctgatacatttgcatctgcttttgtccgtaaccagccttatagatatggcgttccaaagtagaacgctttaaagtaccgggtaccgcaagcccttccgtttccagaatgtagatgatctgggcaaccgaccgctccggaacctccttgcgaagttggattgcctgttccaacaggaacgaaaagttttccggaagtttttgtgaccggtgtttctcacggtcagcaggttttagccctgtaaactgcctttccgaaaaagctttttcatagcggtaaagggaacggacagatatgttgttttcctctgcaatctttttgcgaagctggatacgctttgcatcatccagaccagtctggagaagcggtgaaatcaattgaaaacgcctgagggcttcttcctcttgccattgttgtctgtttattgttgtattcataagataatgacctccttttgagaccaatataccctttggtactttgacagacgatgcaaagtaggtgcataagccttaccagcggatcgggactaaaaatcctccgctgttgtaaatctggcgtaagatgatttccaaccagttttgatattgattcctgaaaaaatcgagcagtgaaccaggggaaatcctctcttcattataacccagcaggaactcccggatcgtccttaaatatccgttgatacgttcaagattttcgcagaaccattgcagccagcggagcatggtagcgcaggacgggtagtcttcagaatctaagtcttccggctgtacaacgccatccagcaccccggagatcacttctgtttcgtaatgcttgtacggaacaagacaatccggaagttcattatgataagagtggcagttcttacaataaaaccgccggatgatcaactgatcttttaaaccgccttcctttctacggatgcgtgggcgtgaatcccggtaacgaagcgtagcctgacagatggggcacatatgggtggtcacactgctctcaacaaaaaacaccaaaatcctccttgaggacaagtgaataatctgatataataaccatggtttagtgaccagggtctcagagtacacaacttgccaggagggtgctctgagaccttttcctttttgtatgctgatgacagtatacaggtcaattcagagacaggcaagtaaatcagtattttgataatttatgaggtcaacaacagttacggatttttccggcttcctcaagctgttctaaatatttttcatacataataaaatcctccatgtaaaatcagtagtaatcaaaacactgctttacacggaggtgcatttgggtcataaaaccgcttgccaaccaagcggaagggtggtattcttttcataggcagtgggaaggtcgatcctgtttgattgttattttgtggtgatttaacaatactacttttaggacttgctttccactgttttttattatagaaaacagaaaatcgctatgccacagccttggcaggccatcgcgcagcgattttgttcaattccagtttgtataacaggaaaatttaaatttagcgaggaaaaatatatgaagaaaataattaaaattctgattgcgctgatagttggatttgctcttgcaatgctattgatgagcgtcgcaatttactttggatatactaacgcatatagtacagatgtaaatacactaactgttaaaatactcggaatacctatttacgaacttacaaagtctggaacagagtatattggcaaatcaataggagtttatatgggggcagtatgtggtatttgtatggcaatcagtgttattgctgaagaacttatcagcaaagcaagacacaaataaatcccagtctgtaggagagattgaaagtacacgattatttgaattttgcggagaccaactatgaataaaataattgaaaaatataagtgtccatgttgtggattttatacttttgatgaaaagcctaatggtaattacgatatatgcccagtgtgtttttgggaagatgatccaatacaattagaggataatgaatatgaaggtggagctaatcgagttagtctcgtacaggcaagacataattttttgtcgtttggtgcatgtgaagaagaaatgaaaaagcatgtgcgaaagcctaaagaagatgaattgcatggtattgattagcaatgtgaatttttcagtaatacagagagacgaatttgaatttgttaggcttcttcgcttaaagagtttttgcatattaacactgaaattattattactacacatgaaaaacaaatcatgaaaatggaatcaaaattattatttacatttaaaagctccaattcattagcatagagcactccattcatgattgcatggaacactatacttaaagctaaatataccactcgtttatttgttacggatttgtaatctatcaaagttaaacccatcaacgctccaaaactcaaaattcttccaacaacggcaattaaacaaccaaaaatactcatatgagtagcaaaaattgttacaaaatcaaatattgtatgtatgctactacgccctaatccaaatacaatcggtgtttccttagatttttctttttttagcatagttttaaatacaagataatatccaccttcttcaaacaaaccctgagttattccaactgcaacacatagtaataatgaatgtcgtaaaaaaaagtctttgataggtgattcaagtaacaccatgaatgcttgaattggctgtggtagcaatagtccaaaaatcaataagcttaatactccaatcaagaatattttatactttttcatcatttttctcctaatacaacttcaaattcatgcatactttcaatctctccacaagactgaaagttgtcgctttactttcaaagataaaactttaattttccttttaaccataaaatagagaaattggatttctatttatcgtttcttttcattctcaccttcccagtcatattctttacaactagcttaaataccgttgtatgaggcataactgatttattaaacggaaatgtttcttgatgataatgtttcattaatatacataaagcatcatatttttcttcttcgggaagtatttcaatatatccctttccaataacgctttcatattccatagtgcaacttccccgttctaattctgtaacaagtctatgttcacagtccatttcaaaactagccctattatcattttgaatcaaatcatacttcatcccttcatttgctccatggaagtacagctctacaatattattatcaactttcattccaaaatttaatggtaaaatgtaaggatatccgttattatttaatgcaattctacatacatcacatttttccataattctaattataccatcaaaatcttttacctctctgtctgaacgtctcattctatttctattctcctccctacaaaattcaaatttttttattatccaagctctaaatccagccacctagcatttgcccagctacgctctttttttgtagaaactcatcactaaaacaaaagatataagctgacctattaatattcttataatctgcaaattatcagcttcgttgttagatattacatgtaaaagatttgttacaacaatattattgaacaagtgatctccaatccccatccatagtgaacctgtcattttataaagcaccgaccactttatgctcataacacccgacaaaataatatatccaattcccattacaagtaaattaccgagagatgagttgccttctatatagtctctcataggcataacccaatgccaaactccgaataataaggcaataaaaaacactatgcctttgaaactcattctattttcaagcagacgagagaaaagtcctcgaaaaatcccctcttccatccaaacatttataagattgaaagtaatacaaagtagaataaatccaattccagtttgcttaaccgcctcaccgtttaatgaaaaaccacttgtataaacagaaagctgaacattcccattcatacaatacagcagaacacattctacaagataagcaattgaaaagcaggaaactcccaacgccaatccttttaagatattctgtacaatcttagtttttgtaaatccgatgctatcccaagaaagctttgataacacaagcattaccaccaaaataattatgccaaaaaccttatgtataaaattctctgctaggattgtttcgtctgttcttatcccaaagtactctacaactcttgcgatacagcatataagaaaaatcagcacacaacttaatatagatttttcaaagattacttttttcattttcatcacctatacaacttcatctctcagtattactggaagtttactttgcttttatcttttgtattatcttatttacaataaatactataatagatacaatcaaaaaaccaatagtataattgacaaaaatatctctatatgccgaagatgctaattcagcagttagtcccctaaaccatacatacaaaaaagccaataaaattgttggaacatacaccacaactaatttaattgcaaaattctttatatgtatatatcgtaagcgcttaatttttaggtatgatagaaaaatccccgactacttttcagtagtcggagcaccttgacaattcacatatgattgatttgatccgtttgcacgacgttcgatttcagctttgacggtttccttccatggagccagaagttctaattcatcatcactcattctatcatcaggtagtttttccagcagataagtaagatagtgatagacgtttacgccattggcttttgccatctctaccattgtgtacacgatagcgctggcctgggctccgtttggtgtgtcacagaacagccagtttttacggcctactgtaaacggacggatcgcattttcactgagattattagaaaaactgcagcgcccgtcttcgagataggtagtcagataggagcggcggttctgaatgtaggtgacagctttatccattctgcttccacgggtagggttctgctgatcaagccacgacaaaaagccttctactaccggcttttctttttcaaggcgagccttttttatagcatcgaaggaagaatactttgatctgatcacatcttccagatggaagagctggttaatgtacagcattccctgtacagatggctgggtataatccagtgcttttcccttagggatggcatctgtcagatatcttctgatgtgtgcccagcaggctgtgcgtttggcatccggtactttattgtatccgctatagccatcacacatcagataacccttgaagccgtgaagaaaatctacggcattgtccccggcccgggtctccgagtatttatagaggataataggtggtcctccgtcttcaccgctgcggaacagccacatatatgacttggtttgcgcgcggcgttccggttcatgcagaacctgaagtggcgtttcatctgccatcgcgaatccacgttccagaagtttcctgtggaagtattcgtacataggaagaaaaaatgcttcagaattccggatcacccagtttgccatagtagctctggtgatctccacgccatactgtttccagtccttttcctgacggtagtatggaagaccattacaaaacttctggtacattacccaggcaaccgttccggcagaagccattccataaagcatatgggatctgccatcttttccttttttgataaccggtatatcctgaagcctgcactgcgggcactcatagctcttactgtagtattcatatactttcagttttgccggtacaaaaaccagctcccggcggacaaactcttccccgatttctttcagtggggtaccacaggcagggcagagtttctcttcctcagaaagttccagatactttttctcaacaggaactcccttaaaccgttcagcatctgtagctcttgcttttcgtttttttgctgttttttccggaagaagtgcctcaagatcctctgcttttacagcttctggatcctgttccagttccgcttcattgaaaaagtttaactggcctggaatatcgatggttcttttttcactggaggtgccaaacagttttttacggagaaggtctatctcttctttcaggttatcccgttcctgggtaagagcctcttcccgtttattggcagcatcgacagttgcctgaagtgtttttatcatctttttgagatcgtttatcatgtccttcagctcacggagctggatatctttggaactgtctgccactgctttttcctcctgtttctgatgtttccattataccagaaaacagtggcttttcccagcaaaacagcggatttaccagaccttgaaagtgccgaaaatacagcaaaaaacaagagttttatgtgcatcttttttacgttgccttgatcgcttttggctgctcaatatcaatgccagacatcagccagtcgaactcccgccatgtaagattccggacctcagatttattcctgggccaccggtaagatccctgggcggtcagtcttttgtagatcataacgatcccgtcaggttcttttaaaatagctttgatacggtcgcatttacgaccgcagaaaagaaaaagtgcatggtcgatctccatcgaaaactgttcctggatgatcgcacataatccatcaatggacttgcgcatatctgttctgccacagacgatatagatcgcatcaacacttgagatgtccgctaacataatgactccttcagcgtatccataagcatcttcagaagtaccggtttgatctcattactcattcgtataagcaatccgtctgcttcgatttcaatcgtatgtgaattgtcaaggtgcataggactgtttccattatctggaatcagtcctgccggagaatactccggttctatagcaatctggactacatcctgtttatgggacgtaaggtcaagagtgctggcttttccaactggatccggtatctgacaggcttttttgcggagacgggtaactgcattgtaaaaacagctgggagatatcccatgttcattacaccatgcagcatctgtcaggccactttgtctgcattcggtgaccagttccatccattcgtccagggaacgtcctggagcacgtttattactcataatgaaacctccaaatatagtaaatttctatctcctatcaagcggagtgtagtaaaaatctatttgctatcattatgagttcaaaaacgtagacagtaaagctacccaagatttaagcgcttactatatatctaattagtgagtatgctaaaatcacaattaaagtaataattgcacggtctaattcgtgccagtttcctgctggatcttcatatatcccttttgaaagataagaaatactatttactattgtcgcaattgtatataagccacaatatattaataacaaatcctttaaacctttgttccatatgtttttcatgtattgtgttctccgtcaattggaatttacttgcttttcttctctttgttacatctcgttaatgcgataaatagttcaatgcccccaccacatagccatatgatacctaacgcaatattttctgcccagaaccaaaacagtgatataacgatccatgtaatcgctaaaataaaaatccccttgcttctcatgattttcctcctccaaattcaaattgaacaaaatcgctgcgcgatggcctgccaaggctgtggcatagcgattttctgttttctataataaaaaacagtggaaagcaagtcctaaaagtagtattgttaaatcaccacaaaataacaatcaaacaggatcgaccttcccactgcctatgaaaagaataccacccttccgcttggttggcaagcggttttatgacccaaatgcacctccgtgtaaagcagtgttttgattactactgattttacatggaggattttattatgtatgaaaaatatttagaacagcttgaggaagccggaaaaatccgtaacctcaaagagcgttccatcaactgctataaaaactatgtttcttactttctgaaatatcaagcgaagccccctgaagaacttacctgccaggatgtcagaaattttttgcttgccaaaaaagaggaaggactaagagccacaactctgaacctttataattcggctatccgttttttctatcggaatgtcctgcatatcctttgggatgatatcacagttccacgtatgattctggaacacaagcttccgaccgtactgactgttgatgaaatagaccgtctattagaagctgttgatgatatcaaatatagagccatgtttgcaacgatgtattcttccgggatgcgggtttctgaagtgatccaccttcattatgatgatatttcccgttcaaatatgcagatccatgtccgggatacgaagaacaggatggatcgctatacaattctttctaaacggtgtctggatatccttacacaatactggtttgagaaaggacgtccccgtgggatcctgtttcctaataaatttactggtaattacctgacagtcagtacactggagcaagtgatgcgacgggcagtatccgatgctgaacttccaaagaaagcaactccacactgtctccgtcatagctttgcaactcatctgatggagcagggagtagaacggcagaatattcaggcactgcttggacaccgtgacccaaaatccacggaagtttatcttcatgtcagcaacaaatccctcatgggaatccaaagtccctttgacaggaaagaaggtgctgattatgaataagcccaccgttcaggatattttccggtgtttttatccggcataccttgaaaagtattctccttctacggaacaggcaaaagttgcccggaacatcttgaactgcaaaaccggagcctatggtgcaaacgtcagtgtatgtgaagactgtggtgctgttcagattcactataattcctgccgcaaccgttgttgtcccatgtgtcaggctgttccaaaggaaatgtggatggatgcccgcaaagaggatgtgcttgatgcaccctacttccacttggtatttacagttcctgacattctgaatccaatcatttacaataatcagaaactgttatatgacaccctgtatcatgcagcttctgctacaatcagtgaactgactgctgacccaaagcaccttggtgctgctgtcggctatatctgcatcctgcatacatggggatctgaaatgaactttcatccccatatccatacaatactgctcggcggtggtctgacatccaaaaacgaatggaaagacaacggtactgagttttttcttcctatatgggctatctccaaagtctttcgtggaaaatatatggatgagttgaaaaatctctggaatacgaatcaacttaagtttcatggaactgccgaaaaatacagtaaccattatgtgttcaaagaactgattgatttctgttatgatgcggaatggattccttattgtaagaaaacttttaacggcgcacagtctgtgattgactaccttggaaagtatacccataggattgccatcagcaatcaccgcatcatctgtatggacgatgaaaacgttactttttctgtaaaagattaccggaacaaaggacaatggaaagaactgaccctttccggtgttgaatttatacgacggtttctgatgcatgtaccgccaaaacgttttgtcaggattcggcattacggacttctttgttcccgtagcaaacacaagaagcttactttatgccggaatctccttggatgccaaaagtatctctcgaagcttcgaggtaaggagatgccggaaatattaaaacagctttatgaaataaatatttgtgtgtgtaaatcctgtggtgggcatcttggaaaaccacagcttcgaataccacaaagatgttaaaatcttattctttcatacattttctaaagcctcaaagcttgaggttttgttgtcgtacctaatttatctgaaaacacttgatttctgtagcttctgcacaggaactcctgtataatcatgggtaagaacaaaagattgaaagtccataggtagtagctacccggacgctcactttgttcaattaggtcaaatcgaaaatggtgtaaacgaaggggcagttcactggaatgccaaaactgctttttcgtttaccccatcatcgattctaacctaaagaatttatctctcaacctcaacaatcagctcggagaatatgcctgatatgttgattgtattttcggcagtttcgttttcttcaagctcaacaatttctccgtttttgcgggtgatgagcttgcattttctgccgttatttgagagtttgtagttatctgcattttcaaggtgaacaatcgctttcgctttgaactggtttatatcaagttttgtgcagttacctgaaataaaaatttcgtagtcagtctttgcggtaaactccagacttccctctgtgtcccggataaaaaccttttctgcgtcgccgtcgtactcaagtcggctgaggcgtaaatcctcaataagaagttccttaacgcttgctgaaacctctgtatgctcggtaaacttttcagggagtaaaagagtaatatccacgctttcctgtgcttcaaaacggctgacgccctttttatttacaagttcaatatccaacttattacgcttttcgtcaagtttcaccttgaaaagagagccaatttcagcaagtatttcggaagaaagcacaatgtggattttttcatccacacctgttttgatagtaattttccttgcaccgcccaagtttatatcaaaatgcttgccggtgtcgatatcataaactgtttcgctttcgaaaaccaccggcttttcttcctgttttttgacctcttcaagcacaagctcatcgagagtgagcttgaaaagctctgcgaggataatcatattttcaacatcagggagacctcgcttggtctcccattttgttatagtttgacggcttactcctgttttctcagcaagctgttcctgagaaagtccctcttttaatctgtactgctttaatttatcaccaaaatccatttttgtctctcccttattccttaatgagtacatatgctgaaatctttcttatcggcatacacaaaataatacttatcataatgtttactaaaatctgagctactgcaaatagcattaaaaagccaaatgaaatctcaatgttatttttcatggcacccaaagtctcaaaaataaattgatagatagccggcatataataaattgccaaaaagcttgaaagcacaattgccaccatcgacacaggcataaatgaacctgttgtctgtaaaataagctgtgaacttgtgtagcccattgctttgtaaatacctaactcctgtcttctttttacaagcagagacttgatgacaatatataaaataaataacacaacgagaattgttaccgcacaaattgatactacaagcaccacagtgatacccatatacatatcctgtgcttcagtttgaagcttgtaagaattcactgtgtctgctaccaatgcagagtaatcggatttatattcctttgtaatcttttcggcattttcagcattttcaagatacacatagaggtatggagtctgattttggttaaagagactgttgtatccttctatgctcagttcacaaagctcgccctgtaaatttacgctttgcacaaagcctgtaacctgaaagctttttgtgataccgtccaccgtcacgctgactgtatcaccgattttaaaattttcttcaaaagcactgcccaaagcgatttcatctgcatctttcggattttcacccatataacatacatcatttctcacctttgagaagtcctcgcaggcaaaagcagtcactgttttctcttcaattttaacaattgcagacatatatttcaatgaattttgcacacgattatcgttaccaagttttgactcaagctcactcatgctgtcgcttttaggataaataatcacatctgctacttcgtctgacaaagcagacataaaattatccggctcaactactacattgtagaacagtgtgcctgaaaatgctatgagaaccgtcagtacaaaagacaccagaaagagcattatattctgttttgtagaagctatcatctgctttaagacaagcaggaattttgtattgcctctggtttcttcaagcggaaaataatttttctttgtgtgctttgaacttgtattacctcttaagccgtcaataggctgaattttcttgatttttcgtgcggatatatatgtgaagaacgaaacaacaccgcaaagaatacaagccacacatacaaagctcagcaaatcaaagctaacagcaaacgaaaaacctgactgaacagtaagcactgagcaaagcacaggaagtaaagtgtaagacagaccaatgccgagaattgcaaacaatagcgaaacaatagcataaggcagtgtgatactcgctacaatctgagcacttgtataccccagagctttaagcacgctcatatttgtaatttcggactcaatagcatttttaactttgaagttacttaggaatacgctaactgcaaggatgattagtgcaaaagcggttaaaataagtacaagcagatccgtaaccattgtccgtgtaccctttacgctttcgctgtcaagaattgataaagccataacacctttgttctcaattgctttgctgacatcatctttcacttcatcaaggcttgcatcgctctttacgctcattgaatattcaaccacagccttgtcactataagaatccgcaagctctgcaaactcttcttttggtaaataggcacacagcaaacccgaaccatagttgccgtactgcatttcttcaatcacacctgccacagtgaaactatgggacttgccgtcaattgcataaacgatttcgtcattcaaagcaaatccaccaaagttggatacataaagtgggatatagattggatcgtcaacattatttttgctttcactcacaagttcataattgttaagagtacgcttgtcgtcaatgttataaaacactgtgttcattgaaaaatccgcaccattgaaatccttgacagtagcttctgtcataatagcagtatagctttcgattttctctaccttttcgatttcatcaattgctttttcaagttcactgctgttctggacctcaggaacaattgcggtgagcattgcgctgcttaacttttcaaactttgtatcataagccctatctacctgacacagcaaaaccgctgcacaatttaatattagagcagttatcagaatgataacgccgaatgatataaaggaggttttttctttttttaagttgtataaaatctgatttgctatttttttcatattaccatcccatctctgttaaaaagttgtttagctttgcttcacggtctttactttcatttgtgtaaaccccaaggtcacactcaccgtagatcatgccgtccttaacatataacacacggttgcctcttaaggctgttttcttgtcatgagttaccaatataatgctctgaccatcattatgaagctttgtaaaaacatcaagaaccgcagttgagttatttgagttcagtgcacctgtgggctcatcggcaaagagaatctcgggtttatttataactgcccttacaatgcctgctcgctgagcctcaccgcccgacacctgagatgggaactttttgcgtgttatctcaggaatattaacaagctcgaaaagctctttggcatatttcactgagtcctttttgcttgctcctgacaatgcactcgccgtaagtacattatccataaggctcatcttatcaagaagatagatttgctgaaaaacaaaaccacagttctttcgtctgaaaattgccagcctatcatcacttaaagatgtaattgttttgtcgttccaaacaacctcgcccgagctgggcctgtccattcccgaaagggagtacatcagtgtggacttgcctgcgcctgaactacccataatcacagtaaagtcacccctatatatattaaggtctagattttcaaaaattgtctgctctgtgtcacctgtaataaaactctttttaagtttagttgccttgataatgatttcttttttgttactcataacaatgcctccatcagtattttgatttacactcgcatcttacacaaaatgaaaaagtagcaccaccaacacctgtttacaaatcaaaaaacggacgctactttccgtagcatccgcttaaaatcaagtttttcaacttataatccctgattcaagtcgagcatccgcgagacttggcgcgtgattctgggcagcgtaagctgacacattctttacagaatcactgcgcatcctcgcggagcgtttatctcagtcggagattggactcccactgagacaaatttgctgttactcaccacctgaaagaggtgggagtcttctcgactgagataaatctcctctccaagaatagccttgtcacgcacatagcaggcaaagctattaaattgccaaatatctcctactcgataattctctagtaagttaatttcttttattttatcacaccaagcctagatattctgccaacattttatcaaaaaacatttatagaaatcaccagactgccaaactatcaatcgcatccacccatgcctgcatttcatccagttccaactgccatttttataatttgttataagttgttaccagattttctttcccttgttttttcccttatcagagttcataaccaagggtaaaacgatataacacgatacaagatgtgacggagaggacacccacaaaaactttagtatttcaagggtttgacgagatttttataaccagatataacagttattaaatcccttaaaatacctcaagtgagaattcaaattcatgcatactttcaatctcttcataagactggaagttgtggtgtatcttatcaactcgtccgtttattgttcattatataaaataacaatactattataaatgaaataagctgaccaatcaaaattctcactatttgcatactatctgcttcattatttgatataacatgaacgagattagtgacaattacattattgaacaaatggtctccaagtcccatccacaatgagcctgtcaacttatataataaggaccatttaatactcatgatgcctaccaaaactatatatccaattcccataatcaaaagggttgacaatgatgattttccttctatgtagtcacgaaacggcattacccaatgccacacgccgaataggaatgcaataaaaaaaactgcttttccgtttcgccactcagagaaaagccgcttgcatagaattccagttccacattttgatttgtaatgtgcaatatcaaacactcaattccgtatgcagcagcaaaacaaacgctgcctaataaaattccttttccacaatttccaattgcatattcatttacaaatccaatgtctttccacttcatttttgaaatatgaagaataataaataaaagaaaaatcccaaataacttatggataaagttctctgacaagaacgattcgtcagttcttataaaaaaatattcaactattcttgccgcagcacatatcataaaaattagccagcaaactatcactggatgctttctaaatttatccataaaacttctactctttgttctcgcaaattactaaattaggatttttccacttccaccttcttgccctacggacaagaagtatccctcgctttcagctcggtcaattcgagtttttagaacctatggattggttgaaatatggaatcacacgaaaaggtctggaagaagccgcaaaaggaaaggaatgaaactgttatgactgagaaagaaaaaatgcaaaagcagatgctttatgacgcaaataacgacagaaatttgttagatgaaagagccaaggcaaaagacctttgctatcaattcaatcagctccgtccatcagatgaaaaaggacagcaaaaacttatgaaacaactgttaggaaagacaaagaacgtattttgtattgttgcaccattctggtgcgattacggctacaacatcgaaatcggagaaaatttctttgcgaatcacaacacggttattcttgatggggcgaaagtgacttttggcgataatgtgttcattgcacctgattgtggcttccatacagccggacatccgattgattttgaacgccggaatcaaggattagagtatgcttatccgattaccgtaggagataatgtatggattggtgccggtgttcaggttatgcccaatgttacaatcggaagtaatgttgtaatcggaggtggaagtgtcgttgtcaaggacattccaagtaattcggtagcagtcggaaatccttgcagggtcattcgagcaattatagaagaggatagaaagacctgttgggacagataaattccagttgtgcgcccagctaagggtgtgtagtcaagccggtgggattccggtttatccaaggtttagccaaccagataatagcgagtcttgggatgatgccggtaacggcatctgacaagcgtagacagcaagaaagcagggttgaatagtgattgagcttcgaaacgttaacttcagtcggtcgacgtcttaactggtgcggaagacaatatcatgtaatgcgatatggcgagtgttatgtggcactgcggagtcagagaaccaatcatgttttacattgtgaatacacatcaactggggagaacctgccatttctcgaagaagagtatgaagttgcaactgaaaacggaggatttcaaatgaatggtaggtggtcggacaatcccatagtactgtagaaatcgggcaatgccgatggagggaaggggattgcatagtaaaggtcttactgaggacacattatccgtacccagggacggaggaaataatggaaacgaaattagtaagaatagctgagatatcggcaacatcaaaacatcctatatttacatcagtgtaccatttgataaatgaagatatgctaaagcaatgccataaggaattagatgggaacaaagcagtcggaattgacaaggtaactaaggatgagtatgggaagaaccttgatagaaatatcaaggaactggtacagaggttgaaaaacaaatcctttaagccacttccgtcactgagggtatatatacctaaaggaaatggaaagaaacgaccattagggattgcttcctatgaagataagattgtacaaatggcagtgaagaaaatactgggagctatttatgaaccgagattcctaaactgcatgtatggattcagaccgaatagggggtgtcacgaagcaataaaagaagtataccaacggataagctatggaaaaatcagctatatcgtagatgccgatatcaaaggtttctttgaccatatcgaccatgattggatgatgaagttccttgaatggaatatacaggataggaacttattgtggctaatacgtaaataccttaaagcaggaataatggagcaaggaaaattcgagccaacagaggaaggttcggcacaaggctcagtaatgagtccgatgcttgcaaatatatacatgcatcatgtgctgacgctgtggtttaagctggtggtgcaaagggaaatgcagggagagtgttttctcgtcaactttgcggatgattttgttgcaggatttcaatataagtcagaagctgaaagatactataaagaattaaaggaacgaatggaaaagtttggactggagctggaaagtagtaaaagcagactgattgaatttgggagatttgcagagcagaatcgtagagcaagaggagaatgtaagcctgaaacatttgattttctgggatttaccttctactgtagcaaaactcgaaagggaggtttcgtgccaaaggtacagacttcaagaaagaagtttgagcaaaaggttagagcatacaagaactggatttacgataatcgaaatcgaccaatgcgagaaataattaaagagttgaatgtaaaactaattggacactatcggtattatggtgttacatggaattttcggaagataacaacattcctgcatagagtacaacagtttctattcaaagccatgaatcggagaggttgtagacgggcatacacatggaatggatttgtggaaatgctcaagtattacccgttagcaaaacctaaaacgtactattgtttatattgaagcgaatgttactatgaggagccgtatgcgggaaagccgcacgtacggatctgtgaggggctaagattgagaggtcttagtctactcgactgtagaattcaaaaatttaatatgaaatgtgagatagagcgtatggaaattaactatacgttctatttttttgccttttttgaaaaagtgattaaaaaactattgacattttgttactggcaagacagctaagagcatacttattagctgcggggccaggcttgcgccctttgacatcccccagctccgggagattatgagctatgacgagctggagctggaccgcttaggcgacgagaaatcggcgctgttctttcttatcagcgataccgacaccacctataacttccttgtggcccttgccttctctcagatgttcaaccttctgtgtgagcgggcagacaacaaatatgggggccgccttccccaccatgtacgggtgctgtgggacgaggcggccaacaccgggcaggtgccggggctggaaaaaatcgtggccgttatccggtcacgggaaatcagcctaaccctcttttaccaggccatgagccagtgcaaggccctctacaaagacaactcggaaaccatcatgggaaacatggacagcattatcttcctcggagggcgggaggcgtccaccttaaaagacatttccgagaactggctgggaaaggcgaccatctccatgcagaccgaagggcgcagccgggggcagtcggaaagctacagccagaacctgcaacggcttggccgggagctgatgaccaccagcgagatcaccaccatgccgggggacaaatgtatcttgcagcttcggggcctgccgcccttcctgtccccgaagtacgacttaaaaaagcacccgaattacagatataccgccgagtttgacaaaaagaaaaacgccttccatctggaaagcctgttccgccgccggccattgagactaaagccggaggacgagtacacggtgtacgaggtggaagaaacggacacggacgaagaagctgacctcctaaactttgacgacctggacagcgacgagttcgtgtgacttcgggccacattggcccgaagtgacgccgccatcatgggcggctttttttgtacccaccaatccatcttaatcaatgaaaaggagaaaactgtatggaatttttcaactctgctatcgacgttctgaaggttctggttatggctctgggcgctggccttgccgtgtggggcgtggtcaacctgctggaaggttacggttccgacaaccccgcggcaaagtcgcagggaattaagcagctcatggcgggcggcggtgtcgtcctcattggtatgcagcttatccccctgctgtccggcctgttctaaaccttcccctgtatcctgtttccagtaaaaggagctgatttatggattttatcatcgacgcaatagtggaatggctcaaaggattgcttgtcgatggtatcatgggaaacctggacggccttttcaataacgtgaacgaacaggttggagagatcgctgtgcaggtaggcacgaccccggcgaactggaacgccggggtcttttccatgatacggcagctatccgaaaccgttgtcctgccgattgccgggattatccttacctttgtcgccacttatgagctcattcagatgctcattgaccggaacaacctccacgatgtggatacctggatgttctttaagtggaccttcaagaccttcgtggctgtgatgatactggcgaacaccttcaatatcgcgctggctgtctttgatgtgagccagcacgtcattcagcagtcggcgggcattatccagaacgggacagagatcacgccggacgtgatggacagcttgcggacggagcttgaggcaatggacgtggggcctcttctcggcctgtggctgcaatccttccttgtgcagcttaccatgattgccttaaatattgtgatctttgtcattgtctatggccgtatgattgaaatttacttactcacgagccttgcgcccatccccttcgccacggtgtccaaccgggagaccggccatgtggggcagaactacttccgctccctttttgcggtgggctttcaaggctttctcatcatggtctgtattgcgatctacgccgtattgatacagagcatagcggtggacggcgacccgatgggagccatctggggctgcgtgggatacacggtgcttctgtgcttcaccctgtttaagaccgggagcctgtcaaaatcaatcttcggcgcccattagtgacctcgggccatattggcccgaagcggaaaggaggcggccatgtcccggcgctataagctgggagcggacggacagccccgccgggctttctatggaaagctcccggaggaatttacccgagaggacatcatgcgcttcatggtggaaaccgatttacagctttccgggaacgtgtcggcggaaacgctggccctgctccatgcggaaggctattgctatcaggacgggaaccttgttcccgccggaaaggaggaccttatggaaaaggaacgggcggcacgcctgccgccgcacccgcgccgctgaaactggacgtaagtgtgcgggtcattgaacctgtaaaaaacctcatgggctttgccagtgtgaaattcaatgactgctttgtggtggaaaatttgaagatcgtgcagggcagcaagggcctgttcgtggggatgcccagccagccggacggcaaaggcggctaccgggatatggcctatcctgtcacaaaggagttccgggcgcagctcaattccgctgtgctggacgcttatgaggcaaagctggaacagatggcggagcgcgggaacagcgggcgggcctccatctccgaacagctcaaagccggaaaggaggccgccgagcagacgaaagcggaaaaaccggcaaaggccaaagccagccgtggacaggaacggtaacttcgggccagcatggcccgaagcggaaaggaggcggaacccatgccacgaaaacggaccggctatgacgcggcctgctactatgacggaaaactgctgggccgctgtaccagagcggacagtgaagcctactgtaccctgatgaaagcctgcggcggggacgccgcccgggtgctccgggagtacgcctacttttccccggagcttcgcgccattctggaaaaggctgccctgatacagtctgaccgggaccggacgggcggaatgttccatgcgccccagacctccccgtgggggccggtgcagacctgtgacaccctctgcccgggagtgttcttagtcaccaccgccagccacggcgggacgatggttgccagtgaggcggcggctatcctctccccggcggcgaaaaagtgcggcttcaaggataagggctacctctgctttgaggaggacgcccaggaaagcgtggttcttcgggagctgctggacaaaaagctctggaaggtgccggatcgggtaaaggacaaggccgcctttgaggaaaacatcaaccgctccatccggcagtacaacccggactactggcgggcaaggcagagcggcatagaggccgcaaaggaggcccgccgcccacggcctgaccgggaggccgcaagataacctcgggccatgctggcccgaagcgcaaaggaggtgtgaaccgtggcctatgtgccagtacccaaagacctatccaaaatcaagacaaagctggccttcaacttgacgaagcgccagctcatttgtttttcagcagccgccagcgtggggctccctacttatctgcttacccggggagctctcggaaacagtgccgccatgctcttaatgatcgggctcatgctcccgttctttttctttgccatgtatgagaaggacggcctgcctctggaaaaggtcctgaaaaacatcatccgcacctgtttcctctatccccgggtgcggccctacaagacggaaaacttttatgcgctgttaagcgagaaggaggcgaagccgattgcagaaacggacaaacgccggaaagcccgcagcaagaaagcctgacaggcggggccttttcggcttgtttgcaaagaaaaaagacattcccaccaccgcccagcagaccctcccttaccgggaaatgtaccgggacggggtgtgccgggtgtcggaggattactacacgaaaaccatcgagtatgaggacatcaactaccagctcgcacaggccgaagatcaggcggccatctttgacgggtggagcgcctgcctcaattactttgacagcacccttcctttccagctctccttcttaaaccaccggagccgcccggaaagcaggtacagcgtcaatatccccatgcaggacgacgagtacaacggcgtccggcaggagtatgtggaaatgctggacaaccagattgccagaagcaacaacggcattgtccgcacaaagctcgtgaccttcggcgtgaaggcggacagcctttcttccgcccgggcaaggctggaacgggtggaggcggatatttgcggcaacttcaaaaagctgggcgttaagtcccgctccctgaccggtctggaacggctggaactcttacacggccagctccacccgggaggcacagaccctttccgcttcgcatgggatatgataccgaaaaccgggctttccacgaaggactttatcgccccggacagcttcgacttccggttcagccgcctgttccgggtggggacgacctggggcgcggcctcctacttgcagatactggcctcggagctctccgacaagctgctggcggagcttctggaaatggacgcagaaatgaccatcaccctccatatccagaccgtcgatcaggccgccgccgtgaaatccatcaaggccaaagtctccgacattgacaagatgaaggtggaggaacaaaagaaggccgcccgggccggatacgacatggacatactcccgcccgaccttgtgacgtacagcaacgacgcaaagacccttctggaagatttgcagagccggaatgagcggatgttccttctgaccttccttgtggtaaacatggccccgacccgccgggagctggacaacgacctgtttaccgtgtcgggtatcgtgcagaagtataactgctccctgaaacggctggacttccagcaggaggccgctttcctgtcaagccttcccctcggccataacgggattgagatacagcggggcatgacgacaagctccacggcgattttcgtcccctttatgacgcaggagctccgcatggacggcgaagcggtctactacggcctcaacgccctgtcccacaacgtgattatggcgaaccggaaaaagctcaaaaaccccaacggcctgttcctcggggtgcccggctccggcaaatcctttgcggcaaagcgggagcttgtgaacgtgttccttgccacaaaagaccgcattatcgtggtggacccgatgggcgaatactcgccccttatcaagcggctgggcgggcaggtcattgagatcgccccggacagcccccatcacatcaatccgatggatattgatttgagctttgacgaggaaaacccgatggccctgaaagctgactttatcctgtcgctgatggagctgattgtcggcggcaaggacggcttgcagccggtggagcggacagtcattgaccgctgtgtgcggcagatgtaccgggagcacttgcagaacccggagacggcagaaatgccgaccctccagaccctttatgacctgctgtgcgcccagcccgagggcgaagcggtgcggctggcgacctcccttgaaatctatgtgtccggctccctcaacgtgttcaaccacaagaccaatgtggacttgaaccgccgtctggtatgcctggacttaaagaagctgggggcgggccttcgtactatcgccatgctcattatgcaggaccttgtcaattcgcaggtgtccttgaacttcctgcgggggattgccacatggtgctactttgacgagttccatgtgctccttcgggacccgctgaccgcaagctactgtgtatccatctggaaaatgctccgtaagaaaggctgcgtacccagcgccttaacgcagaacgtgaaggacttccttgccagcccggagatcgagaacatctttgaaaactcggatttccttgttctgctctcccaggcacagggggaccgccagattttggcgaagcagctcgggatcagcccccaccagctttcctatgtgacccacaccaactccggcgaagggcttctgttcttcgggaacaccaccattccgtttgtagaccacttcccgcagaacacggagctctacgccattatgaccacacgcccggaggacaagaaacgggagccgggaaagggggcgtaaaccatcagcaagaaatcaaaacgaaaggaaccgtccagacggcccacgccgcaggcggaaacttcgggccagagtgacccgaagatacgggaaggcccggaagcctccggtccctcccggcggctccgctttgaggacgaggacgccccggagggaaacgggaccacttcgggccaacatggcccgaagccaaagggcgggaaattccggcaggacgacgaccagccccggccttctgaccgtatgcggcaggaggatgaaccgggcggcggggagccttctggccgggagccggagggctccgggagtgacagccggacagaccgcaggcagaaggaaaaaacctctgacgccaaaagcgaaaagttccggaaagcgcaggaaaaggcagaccgggccggggaaaagctgcataccgcccgggacaagctggacaaagcgcaggccaaacaggcggcgaagaagcctcccggccttgcaagaaaagccgtccggggagccagaaccgaggcgtggttctacgtccacaacaaaatccatcaggtggaacaggaaaatgtgggcgtggagggagcccataaatcggagttagtggccgagggcgcggcccgcaggctgacccgctacgcaaaacggcgctaccgggaacacccggcccgccgggtggcaaagtgggaacgcaaagaaatgagtgcccgggccaatctggattttcagaagatggctgccgagcacccggagcttgccagcaatcccctttcccggatacagcagaaatggaaactgaaacggaagtacgccaaagaagccaaagcggcggcaaagcagagcgcaaagggcgcaaagaaggcggcggcctccacgggcagcgcggcgaagcgggccggacagttcgcggcccgtcacccggcaggcgtcctccttctcctgctgttgtttctggtgttcgccgtggtagcttcgacaacctcgctgtttaccacggtaggcggcggcctcagcaacgccgtgtccggcacctcctacgcttccgaggacgatgacctgttaggggcggacgaggactattccgctatggaacgggagctttcccagaccgtggcgaatattgaacgggaccacccgggctatgacgagtaccgctactctgtggacgagatcggccacaacccctatgagctggcctcctacctgtcggcaaagtaccacgtttacacccgggaacaggtgcaggcggagctgcgggagatttttgaggcccagtacgagctgaccttgaccgaggaagtggagatccgctaccggacagaaacacggacgggcacaacgacttccactgacccggaaaccggagaaaccattaccgaggaatatgaatacgaggtggaagtcccctacgagtactacatcctgaacgtgacactcaagaattacacccttccggctgtcattctcccgaggatggatgaacagcagaaagagatttataccatcatgcaggagctcaaaggcaacaagccctacctgtgggaagggatttacacggaaggcggcggcccgggccctacttatgagatacccggcgaggccctgtccgacccgtcttttgcggcgctgatggccgaggccacgaagtatatcggttatccctatgtgtggggaggctccagcccgtccacttcctttgactgctccggcttcgtctgctgggtctataccgcaagcggcgtccacaacctgccccgtaccacggcgcagggcatttacaaccagtgcgccatcattccgtcctccgaggcaaagccgggggacattatctttttcacgggaacctatgacagcggggtgcctgtctcccacgtcggcatttatgtgggcgacaacaaaatgctgcactgcggcgaccccatccagtacgccgacattacaagctcctactggacgcagcacttttacgctttcggcaggttatcgtaatttttaagaagggagtccatacatgaacaagattgacaagatcgagaaagagctggaaaaggcccgggagaaggctgccgaatggcaggccaaaatccgggacctggagaagcagaaacaggaggaagaaaacagccagatcgtgcaggcggtgcgttccctgaagctgacgcccgccgagctgatggctttccttaatgaccccaaaaacgctttttccgcttcgggccagagtggcccgaagtccgaggataccgggaaggaggaaaacgcccatgaagaaaactaaatccatgaggctggcggttctggctgccggccttttgtgctgctccattttcacggtcccagcttacgcccagagcagcgagccgcaggaggaaacacccccggcgcaggaggccccggcggaacccgaagcccagccggaaacacagaacccgttcagcactgacggcaccgggactgtggtagacaatgccaccgacaaggaaggcaaggagttttacaccatcaccacgccggacgagaatatcttttatctggtgatcgacaagcagaaaaccacggacaacgtgtatttcctcaatgccgtgaccgaggccgacctgctcccgctggcagaaaaaagcgaggaagaaacggcggagcctgcccctgagccggaaccggagcccgaacccacggaggccccggaggaaaccgcagagcccgaaccggaacccgaggcagaagccccggacagcaatctccttgccatcctccttgtgggggttgtggtgctgatcggcggcggagccgggtattatttcaagatttacaaaccgaaacatcaggccccggatttggaggacgactactgcgagtatgaggaagaagccccggaggaagtggtggaggattacgaggaaaccgctgacgaggacaccccgccctgggacgaggacggaaaggaggacgagcattgaatttcacaaacagcccctttgaacggatgatgaaggaggtgccctggccggggcgcggcagcgacgacccctgtgccgggtgccgctaccataaggagtgcaaaggaaaaaagaaccagtgccgcaagaagttccgggcgctggtggtaaagccccgcacttcgggccagcgtggcccgaagtcgtgaatggccgcccgggagctgacccgtgacgagaagaagaaaatccgccgtctggtcacgggaatgtgcgccaactataacggggaaagcggcctgtgccttccgctggactgcccctgctatatgctccacaagtgctggacaggggcgtactgccggtatttcagaaatgccgtcctgcccttagacccggctctggaaatcgccctgaccgatgaaggcatggccccggaactgcgcgcctgcgcagtctgcggcagagccttcctccccgaagggcggcaagcctactgctccgaagcctgcaaggccgaagggaaccgccggaaaagccgggaacgcatgaggaaaatgcgggagaaaaggccgagcggctgttacgatttgcctgccggaaaggcttgatattccgggctttttagagggcgcagccggggcgggaataatagaatactcccgcccccggtctgctcccttatttcgtaacatcagggagcttcgggccacattggcccgaggccggaaagggggtttgaggcattggagaacatacaaggctatgagatcgagaaatccgtcctgtttgagaacagccggggctttgccctgggacataacccggcggctccccagccctatgtaacgtggcagttcacggagaacgagggcggcatccgggactactactggggccactaccatacggaccgggaatgggcagagcgggacttttcccgccgaattgacgattatcaatatttgttcaaagtggaggaaaaggagccggggcaggaaccgggcgggtactaccgctattattccacccagcgcccctttgacataggggccaccccggacacaaaggacaatccgctggtggaagtcgtcaactatgaggacgacaggcggcggcccgttgccggaggaaagatacacgcatggggcgaagccatttataaaaagcccctgaccggaaaacaggtcagggactatgagctgacgcctgccccggataacccggacaggaaacggtctatcaccgcccggctcaaagagggcgcggcaaagggacaggagccgccgaaggagcccgggcagaaattgtagtggtcaagcatttttgtaacgcttatggctaataaaattagtttccaagttatgaagcagtccgtacctgataaggtgtacggtatccattatagctgtgcggacgaacatggttgtatgtgacataggcaaattcttccactgcctggtacagcgcctcctccgtctggaactcgtacagattgacgcattcatttttcagcgtgttgaaatatctttccataggggcgttgtcgtaaggacatcctgctttgctcatactttggcttacatggacggattcgcagaattccacgaaggcctttgacgtatactgggagccctggtcgctgtggaggatcagttcttccttgatctgcggctgtgattccagcgccttcttcaaagtccggatagcaaggccgctggtgatctggcgctctgtcacgcttgcaatgacgctccgatcatacagatcaacaatgctgcaattatagcgcgtttccccgtttttcaaaaacagatatgtgaaatccgtacaccacttgtggttcgcccggtctgcttgaaactcccgctgcagcctgttttcaaagattttgtgcggttttccgcgccggcagcccggtttcttcggacggacgagggaatgcagcttcatttccgtattcatgtatttatgtacggtaactgtgctgtaatggcatcccctgcgcgccagatagacagccatggttcggtatcccgccaccccgttatgcgcatggtaaatttctctgatcagcgcttttgccgcttctttttgggcataataatccgcctttcggcgcttccgatagttgtaataagcattcgggcagatgccgagccgcctaagcagccagcggacgccgaattccctgttatgccgttcgataaaccgataagcctctaatcgatttcctttgcgaagaatgccgctgctttttttaagaaaaggatctccttttccttttcagccagttccctgcgcaggcgcaggatctctttcatattttccgcttcattaacggacgaggggacttgaaggctttgggcttggcattctttctgaaattcattgcaccaccgacggacactttctttggaaatgccatactctgtggttacactgttgatcgttcttccttcttccagacggaggcggacgatcttttttttaaattcaggagtataattctgtggcataatatgtacctcttttctttgcagaatgattatatcttattagccactgctgttacaactttactttatcacaacaaacggaaccacaagacccatgaggacagataggaggactgccatgcacgaaaaagacaattacctgaaaaccgccgagctctccacggagcagaaccagaacatgatcgacggggtgccgaacaacacgccccttcccccggagccgccggagctggacaagaagccgcttgataaggtcaaggagccgaaggagcgccggaagggccgggaactggaacgataatgccgggccgcaagcggaatgtccatcttcatgtgatggtcacggaggacgagctggccgccatccatgcgcggatggccgaggccgggatctccaacaccggggcctatgtgcggaaaatggcgctcaacggctacattttccatgtagaccttgccccggtcaaggagctggtgtccttgcagcgccgctgttccaacaatctcaatcaggtggcggttcacgccaacacctacggggtgtacccggaggaaatagacggcctgcggcgggactatgaaaagctgtgggggcaggtgtcggaggttctgcgggagctctccgcgttggtggcaaagtaagacgagggcggcaggttccaaagttggagcctgccgccttgttctgttttaccatctatatctacgtctctgaaaatgtaattcccgaagtccggcttctttacaaatagatgatagaatttttagtatttcttctcgtgtggaattaaaccattcagcaagctcacgatcatagaagcaataagcgacatcttcgcccgtaccatatgtcgaataggctttttcttttttggctattttcaatctcctacgaattgctgttagcatatcagcgatagtatagagcttttctctccataaagagttttgtatagaagattttccatcagcttgttttaagatagagccatcacgagttcttaatactcctgtattcaaagcaattagcgtatcttcaatcgctttatcaaaatcctccattcggccttcttgataaatgtcatcttgaaaggctggacggtcaaagcactccaaataaaattggataagctctttgtctttttcaaaagcaggtgtggcggaagtggtttcaacttctaaaattgccgtctgttctgcgagctgtttccaactttgtagcagttctttaggataacgggtagtgtccgtatcaatcaatttagaacaagattggcatagccaaattccattttcaaatgactttctttcttcgggtgtcatagaagcgtcatagcgtggcccgcctttagctgctgcacagatatgagctgctactcctatatttgtaactttttcggggtcagtatttgccccacaagtcagctttcggcaagccggattgctacatcttctcccgacccgatttgccagtaattcctttgttgctgaagtaaagtcgtctctggtgttccccatgttcatcacctcatctaaccaaaatgttgatttcattatatcacgacttctcacataaaactatcaaacttcgggccaacttggccggagcccggggacaggtttcactaatcattcgcaacatttatgtccccgggcagacatggtaaaatataggtagaaagataagaaggaggtttccactatgaagatgatattgaaagtaattgccgctccctttgcccttgtcctcgctttgctgactgccttgtgctggttcctctttgacctctgcgctttcttcctgacgattgcctcggtcattgttgcggtcctcgggattggcctctttttcacaccgacaccgctgggcgggtttgtgttcctgttcctcgctttcctgctttctccgtatggcttacaggcggtagccggttcgctgatcggagtgctggacggcgggaaatccgctctgtgccggttccttgtaagctgatggaacctcgggccacattggcccgaagtacaggcggtggctcgggagggccgccgttttctttggaagggagggaaacaatctggcgacaaccacgctcctgcctcgccatgcaggcgaaggcgaaaccatagcggcggccatccgtgactgcctggactatgggaagaacccggagaaaaccgaaggtaaatatctctctgcctatgagtgcgacccggccacggtggcggaagaatttcttcttgccaaagccagctacaaggccgcaacgggacgggagcagaaaaaggaaacggacgtactctgttaccagatacgcatggccttctatcccggcgagatcacaccgaaagaggcaaaccgtatcggctatgaattggctatgcgctggacgaagggccgccacgccttccttgtgacgacccacacggacaagaagcatatccactgtcacatctattacaattccacttcccttgactgttcccggaagttccgaaacttttggggctccagcttcgccctccggcggctctctgacaggctgtgtctggaaaacagcctctccattgtggagaacccgaagccccggagcaagagcaaatacaaacattatggggagtggcagaaagagcgaaagcggcctctaaactttcaagaacggctctgtcttgccatagacagtgcacttgcgaagcgtccctccagtctggaagaatttctcgacctgatgaagcaggccgggtatgaagtaaagaaagtccggggcggcggtcttagctttcgcctgcccggcggagggcaggaccgctttacccggctgcgtgcttctacgctgggggaaggctacgacctgaaggacataatggccgctattgagggcggaaccgggcggcgtgggccggaaagaaaaatcagcctcgccgtggatatacaggcgaagctggccgagggaaaaggcccgggctatgagcggtgggcgaaggtgttcaatctcaaacagatggccgccgcccttgcctacttgcaggacaacggcctgacagaatacagccagttggagaaaaaagcggaagaagcctctgaccgtttccatgccctttcctgccagatcaagcagacggaaacggcgctgaaagccaatgcggaattgaaggcggccacggtacagtatgcgaaaacccgtcctgtctttgataagtacaaagcgtcaaagtacagtcggaaattccttgcggaacatgaggcagatatagaactctaccgggcggcgcaggccgatatgcggcgtctgcttggaggggcaaagctcccgaagatggaggcgcagaaagaggaagggcgaaagctggccgcaaagaaaaagcggctctatggggaataccagaaagcccgccgggatatgcaggaggtcttgacgatcaaggcgaacattgactgcctgctgggctactcggagcctgcaaagaagaaagaaatggagcgttgagggtatgagaaataaggagcaaagcgacgcgatcacttcgggccaacatggcccgaagttgccgggtttggggcgggccccaacaagcggcgtttgtggtctgtggccacaaaggcattgcttgccatttagcgacacccccgaaaacagcacaaaaaaacagaggctcttactcctgaacctccgtttctctggctttcttgagcccttcggctgtagcctccatgacaacaagctctttttcgttcatggagtctaaaagtacatcaatgtgtttccggcaactgtctccgccacggttgccctccgtatagaaaaactggtctacggatatatcgaacagcgtgacgagcttaaaaaacaggttgaagctggggtgctggcctttgttctcgatgttcataatggtgcggtcagttttgccaaccagttccgcaacataggcttgcgtccagcccttttcctctctggcctgtttcagtgccagaccgagcccatgaaagtcaaaccttctttcatcttggttcattttcatatcaccctatatcattgtacatttcaggttgtgttatgagaatgtaatgaaatttgatgtgaagtaatatttaatttcatctatagagcgatatgaacttgtattctttcagcaatagaaatataatggaagggatatgtgctgtgcaaagacagattatatggcccaaaaaggagtaagtagatatagaacatttcagttcgacagctaaattattatattgtaagtcgtgttttcggtaccgtaaaaataacaacgctatggttaaaatcccaaaaacgaacaagaattagtagttgacaaaacaaggaggctaaatagatggctgtacttttaatagcagaagatgaaaaagatatgcaaaacattattgtcgattttatgcaacaaggcggacactcttgcattttagctaatgatggagtagaggcactttccattttggaaaacaatacggttgatctcatcattttagatattatgatgccacgattagatggatttactgtatgtaaatttgcgcggaatatatgcgatgtacccattatttttcttactgccaaaggcgaagaaaatgacaaactcaaaggctatgaatatggtgcagatgattatgttaccaagccctttagtcccaaaatactgttagccaaagtcaatgcgtggttgcgtcatgcaactacggctaattcacagaacattttatctgcgggagaaatattgctatatccatcagctcatacagtcattgtgtctggtaatgaagttgagcttactcataaagaatacgaactgttgcatttgttcttgcagaataaaaatcaagtgttctcgcgtgagcagttgttaaaccgtatttggggatttgactttgaaggaaatacacgaactgtcgattcacacatcaaaacgcttcgtcaaaagttaggaaccgaagggcgtcatattgtgacactaattcgttctggctataagtttgaggtaaaaccatgagcaattcatttaagtcagttgagaaaaaatattttgctttctcaagaactatacgctttgttattacagttttgtatcctattatgttcctcatagcaccgatagagtataaattcctgctgccttttatttggctgcttttatttcttggcggtgaatggctgcaagagatttacttacatcgcattattgtggttccactggggagcattactgatattgcacagaaacttgcaaatcttgactttatgacggtgtgtgatattcagtctaatgatgaattaggcagtttatcaaatagcctaaatactttggcctcaaacttgcaaaatgctttggacgaattaaataaagccaacagacagttaaaaaaagatgtccaacatgaaaggatactgttagaacaacgaaaggaattagtggattctttatcgcatgaaatgaaaacgcctcttggcttaatacaggcttatactgaaggattaaaaaacgagatagataatgataagcgcagaaagtatatggatgccattctggccgccactgaaagaatgaattatacaatcatttccttattagacctatctgcattagaggccggaaccaccgttctaaaggaaactctttttgattttgtagaactgacagaggaagtaggcggacggttattgcttgatgttccttgtgaaagatacagctttacttatgaactaccagagcgggaaattattgtttatgcggaccggcgtagaatagaacaggtacttgaaaatttaatcagcaatgcaaaaaaatatgtatgcgaaaacggaaacattcatttagctgtaaagcaggaaaattcgacaatctatttttctgttttcaatcagggaaacaccattccaaaacaggagatctcccaaatttggtcaaagttctatcggggaaaatggacgggacaaagtggtaatggtcttggcctcgctattgtctctcaaatattgaccatatatcaagttccatttggagctatcaatcatactgatggagtggagttttattttcaatttccgattgcaaacaaataagccaatcaaagccttgcttccttttgggcgcaaggctttattattttacacggatttcacatcaaacgcacttcaattccaagccggttggatacactgtacccactaaataaacaggaaaggaagtgtcttgatgccgcaatatattttgcaaacaaaagaattgtgtaaagaatttgctcataccgctgcggtcaatcgtgttagcatgaatattcagcaaggcgatatatatgggttcattggtgaaaatggggcgggaaaaacaacttttatgcgtatggttgcaggacttgcatcgcccacatctggcacaatcaggttatttgggcaggaaaatttgcaggccggaaggcaccatattggttgcacgattgaaaatcccgctctgtataaaaatatgacagcaagagaaaatcttgaaatcttccgccatgctttcggtgtaaaaaataccaaaagtacagacaaagtattgtctctcatggggttggcggacaccggaagaaagcgtgtcggagatttttcgttgggcatgaaacaacgtttggcgattgcagttgcccttttgggcaatcctcagttcttgattttggacgagccaattaacgggttagaccctgttggaatacaagagctgcgtaatttgttcgtgcagttaaaccgagagcaaaacataacgcttttgatttcaagtcatattttgggcgaactatccaaaatcgctaccagatatggaattattcacaaaggttctcttgtttcagaattgtccgcagatgatttaatggatcgatgcgagcgacacttgattatccgaactgactgtgctgataaagcggtcaatgtcctacaagcacagttgggtattacgaaatataaaattctgacaccatacacattttccttaaaagagtatgtaggacaatcagaagttgtcaataagactctaatacagaatggccttgttcttttcgagtcaacaatctatgaggatagtttggaggattactttaattcgattataggaggtgagaaaaatgactaatctgctgcggtcccagatttacaaattatttcacaatacaatattttgggcgggggccggcttaactatttgctcggtactgttttatgctgtgtttgagagcatgaaagccgaaacagttgctaacggaatgcccctatttcagtattatagtatccttttccagaattacagcacagggcttcccgttttgattttctgtgtggtatttgcttcggatgattttatgagtggcgctgttcattactatatttcaaaaggaatttcgagaactcaatactatttgtccaaaatgacaacctgtgcatttgctgccactctatatgtcgtaattgcgggcataagcggaactataatcagtcaaatactatggcataatcttgatggcttacttcaaataaatacattacagttgttatttttcttctttagccaaatcatactccatgcctcttatgcgagctttctggtgtttacctgttttttatttaggagcagcgtaatttctagtgtagtcaatatgtttttactgatttttgggttttacattgttcatcgtattgaagatgcaatttggaacagttatgtgatttcgatgtattggccggtagcaatgttccaaagagtgcaagtaatgacggtggctgaatggttttctgttgtcgcagctatttttgtaatatacggagtgctgttgacttgtattggaattatcattatgaaaaaacgagatataaaataagcaatctgccggacgacggcaaaagaaaaaaagccgtcgttcagcaggcaatcaccatgccctctattgcggcggctttcaaaagccgccgtttctttgtctttggaaggagatgacgactaaggcataaccagctacggcggcctgtgtggaggtgccgccgtggtttctatttctaagcgacattttttgacaggatatgacctgtcaaaaaaatccctgtgtctttacagggacgttgcggcactgcacgcgaaatttgtcttgacctgacagataatgtgatttcatgtacctgtacggctatgtgccgtccgggtactttttgtttccctgcgtatgacttcgggccaacatggcccgaggtcattccccggtgtcgttctccaccaccttcgtttcggctacccgtcaacccgaacacccgaaacggaggtatttatgaaagttatcaatctgcgggatatttaccctcattatacacaggattgttttattgaagtaactgacgaagtggccgatctgttttccgagttcgaccacaaagaggcggcttaccgtctgcgtacataccggcacaaggcgtactactcccttgaccggaacgacggcattgagcatgaggcccttttcgtcgctctttctccgcatgagctgtatgagcgtaaggtaactatgcaggaacttcataccgccatttcccggctgccggataaacaggcgaaacgtatttacgcccatttcattctcggcatgaccaaaaaggatattgcccgggcagaaggcgtccatgaaaaagtcgtgcgggttgccattgagcgcggtctgcggagcctggaaaaaattttgaaaaaagttctgtaaggcgtaccgatttagacccaaaaatgaaatggtatatgagaggcagtcaaagcctcgggccacattggcccgaagttcggacaagccttacgtagcttgaaaactgaataaaaagatacccggatacgaagggtgcttgtgtccagcgataggcccgccatgatctctattgtcagaggatagagggagcgataaggcccatgccgcaggcgggccttggcaggtctgccggataaaacacaaaatcccggatacttgcgattagtcacaatccgagcgtgcagcggtgttgcgaaccgtgagccgtcgcaggtaatgagatcgccttgccatcagaatggggagagctgaaatgctatggggcggaacgccagccgcccgtccggtctatctgaaaagcacttttgacctgtgggacctcgccgctattctgtctgatgatagagcgacctttccggcggggccccatacttttatgaacaggagaaccttatgaagaaaacttatccgtccattccgggattggaaccggacgcatggagcaacgacgcctgccgtggttatgtgattatggcaatgcaggactgtggcttctctcatgaggatatttgccgcgtggtacggcagcttcacgaagtctttgacttccataccatcaacgaggccaagcagaaatattatcacggcgactattgacctcgggccatgttggcccgaagctggggaaagctcaatgagcggcaccttccggggtgccgttttttgacgtttccccattcggacaagagggagactggtcggcattaacctatactggaaaagggaggttttcaatggttcaagctgttacataccaaagcgacaagcaatctgtttattttcaaggcaaactcattgtgctggaaaacctgacgccggtactctccccggaggaaaaaaagaagcggaaaagagaaatcgaaaataacctgtacgatatattcagcaagtacggggacaggtttcgctaatcaatcgcaacattgttgtccggggctgctaatggtataatatagttgtaaggttggtagctccattccaacaaggaaaggagcccaatatggacattgtcagagaagattgtatttacgcaaggcagtcagtagaccgcaaggacagtatcagcattgaaagccagatcgacttttgcaagtacgaactgaaaggcgggagctgtaaggtattcaaggataaaggctattccgggaagaacacggacaggccggagtttcaaaagctgctgggagaaatccgaaaaggcagggtacggcgggtaatcgtctataagctggaccggatcagccgctccattctggattttgcgaacatgatggagctgtttcaagagtacgatgtggagtttgtttcctccaccgagaaattcgatacctcgaccccgatgggccgggccatgctgaatatatgtatcgtattcgcacaacttgaacgtgagacaatccagaagcgcgtgacggacgcttactattcccggtgcctgaaaggctttcacatgagcgggcaagccccatacggttatcagttggagccgacagtggttgaaggtatccgtacaaaaaagatggttgccgaccccgtagccgccgaccatgtacgactgatgtttgagatgtacgccgagccggaaacctctttcggagacattacccgctactttgaggaacagggtatcaagatttacgaaaagtcaatggttcggagtttcctttcacagcttttacggaaccctgtttacgcacaggccgacttggaactgtacgagtttttcaaaagccagggtgcggcgattgtcaatgacgcttccgattttgccggaaccaacggctgttatctctatcagggccgtgatgtaaaggaggataaggacaggtgcctgaaggaccagatacttgtgattgctccgcatgaagcactcataccgtctgatgtttggctgaaatgccggaagaagctaatgatgaataagacctttcagcaaggccgcaaaccgaaaaatacatggcttgctggaaaagtcaaatgcgggcgttgcggatatgccttgaaagcaacccatgttccgaacagtccgggatatttccgctgtacaaaacgggcagaaaataagggctgtccgggatgtgggaaaatccgaaagactgaatttgaagaatttatcttcaatgccatgcggaaaagatttaagaattttcaagtccgccatgacagagaagaaaaagtgaatccgaaactgaccgctcatcagattgagcttgcacaggtcgaggctgaaattgaaaaactgcttgatacactgaccggagccaacgcgacactgcttgcctacgccaacaaaaaaattgaagaactggacactcgccgccagactatttcaaaggcgattgcagaattgtccgttgaaacaatgtcaccccagaaggaacaggagctttcctatttccttgaccactgggacagcattgactttgaggacaagagaaaagccgctgacggcctgattatttcaatcagcgcaaccagcgaccatgttcaagtagagtggaaaatctgaacactcttgattttgccactctacttactttcaaatctaacatttctttttaatcttgtttgtaccccttgtacaccgatgcttgtttaaattctgatacctgattggcggctctggaaacacaatagcaaattgtcagaaaaaacggaagcttttttgctctgataaatgccagaagagccgtaatatctacatttactgtgacgccaacgtatggataggcaagactgttaaagtattcatatatccctgtttctcatagaagctgatagcggaagagttttcttccaatacccaaagaaaggcttcatatgcgtttcgtcgttttgcagattcagtaaaattttttataagcgatgttccgatgccctctctctggaaaaacggatctacgtacagctcttttaattcccatgtttctgagctttcacagttccatttcatcataccttttacaataccatcgtcaaaaacatagatattatcaatggaatccgggtgatcctgataaaacagtgcaagttttaatacctgcatttcattaaatgaaacttcatcattttgaaatatggagcggtaggagtaacgtttcgcatatatttgtatttgcgctaatcttgatgcatcttctttcgttgcttttctgatcatttttggtcagatctccctttattttctgctttttatactcacattatagctgttccgcatagctgccgcaacagaaacagttctttgcagatgcaggcactatgatcatcgcgatcttaaatgcaatttgtatccttagagttcataaattataagagaaaaaatcaccagagcaaaggagaataagaaacctctcttttgctctggcttttatctggccagaagatatatgcaatttagttatgattatcaagaataatttcgcagaacgcatctggaatgctttgtgaaattttttcgtttaaacggttgtctgcatcctgaacatcccttacagatacggtatcagtgataacacggaaatagatagaaacccacagctttcttccggttcgggcgatatcatagaaaacagggacaaaagaatagtcttctaaaatctcacctgatattttttttatcatgtcaacagtttcctgatcgggagaaaaaagaaataattcccgaaaggtttttgtcagcatacggacagtttccggaagcataaacagcataatcaggattgcaataatctgatcaaaataaggtgacagaaatgccaatggggtgttttgaaacttaacggcaataaaaaaagcaaaggacataccgagactgtatgcaacatcaagtttccaccctaatatttcagctttgacagtgggagatgaaactttccggctcatgaatttcatgatgagtaaaatgaaaaagctaatggagccaagtataagctgaaagagagaaacctgtcccttattaatctgactgcccccagagagcaatttttcaataacacttgttaaaacgcttagtgtaacagagatcagcataatatttttaatcagaataaaaaatgattctaattgaaagaagccgtaaggatgcttttctgaaataggacgatgaaataaaggagttaaaaacaggagtaagataataaaaatcagctcagcagcatcgtatagagcatccataagagtagattgtgaatgactgtaaattgcataaagcagttcggcaatgacaaaagcaactccggaaaaaaaggaaagaagcaggattcttctttctaatatttcttctgagcttttcgatacatgatgtttcatgatgttacctcttttttgtctgttattttatattgtgtatgatagttttgggagaagccgggtatatttgcgaaaggtttctgcaaacttgccgggacattcataaccgatttgcgaggaaatttcggaaatattttcagaagtttctgataacattttcgtggcaatctgtaaacggtaatctttaattaattacacattcctcgcaatggcataaaatccagaaaatatgaatcctggtaggctcgctcagttgtttgaatatattggcagtagtctcgaaattctcagagtcaggtatgtgatccataagttgtgccataggctgtgttgatgcggtaaagtataatgttccataaaaatctccttttttgaattaagtgtaccataaaattgtctttttggaaatacaggaaaacaacggaaaatagaaaacaaaatttcattttagtataggaaaaaagtgatttttagagattgcagacctggcggatttatgttatagtaacttatcataaaaagaaagaggtggaaggatgattattttttcttgcagataaaacagaatatgcagcagtgccggtattcacggcattattgcgtttattgcaagaaagtaatcaatctgtttccttattatattgtttacagctgtcttttcggagatggtgtaattatgctgttacaggctgcagaaaataactttcttgcagctttttatttataaaaaataacagcggggaggcggttgtaatgtcaatgatcagggttgaaaatcttacattttcatatccctcatccagtgataatatttttgaaaatgtgaattttcagatagatacagactggaaattagggtttgtaggcagaaacggaagaggaaaaactacatttttgaagcttcttcagggaaagtatccatatagaggaagaatccagtcatccgtacagtttgattatttcccatattccattgcagagaaaaaggatctgacaaaaagtatattgcaggaggtatgccctcaggcagaagagtgggagattatgagagaattatcctgtctgaaagtagatcccggtgtgttgtggagatcctttgaaacgctttctcatggagagcagacgaaagtcctgcttgcagctctttttttgaatgaggggcatttcttactgattgatgagccgacagatcatctggatgtggaagccagagaactgatagcttcatatctgaaaagaaaaaaagggtttatcctagtatcccatgacagattttttctggataattgtgtggatcatatattatctttaaataaaacagatatccaggtgcaaagtggaaacttttcatcgtggatggagaattttgaaaggcagcaggactttgaagctgcccggaatgaaaatctgcagaaggaaatcagacggctgcgtcagacggcaaagcagatctcagcatggtcagcccaggcagagacgggaaaatttggtgttcaatcttcaggattaaaagcagacagaggctatgtcggtcataaggctgcaaaaatgatgaagcggtcaaagcaggcagaggccagacagaaacaggcgatagaggaaaaatccagacttcttaaaaatgttgaaacagctgaagagcttaaaatatcccctctgcgttaccagagagaggtgctggcatcactgtctgaagttcagatctgttatgggggaaagaccatatgtgagccggtttcatttgatgtgcatcagggagctcaggttgtacttgaaggtaaaaacggcagtggaaagagcagcattctgaagctagtcacaggtatggatattgagtatacaggcaggtttgcaactggttccggacttatcatttcctatgtacctcaggatacgtcacatttaagcggctgtttaagctcctttgctgctgataatgggatagaggaaagtctttttaaagcagttctccggaaaatcgggctggagagaaatcagtttgacaaagatatctgtaatttttccagcggtcagaagaaaaaagtactgattgcaaaaagcctttgtgagccggcgcatctgtatatatgggatgagcccctgaattacttagatgtttatgcacgaatgcagatagagcagctgatcaaggctttttcgcctacaatgatttttgttgagcatgaccgggcattccggaatatgattgccacagaagtaataaaaataaaaagttcttgacttttggaaaaataggattataatatctatcataacaataaattaatgtgataaagcaccaaaatccaatgaagagaacaagtctgtgttccgtaatggtatttcagagagtctgcgttcggtgaaagcagatataccagggaggatggatatcatctcgaaggagctgactgaaacaacagtaagtcatgccggaatcccccgttacagggaaaacgtatgaaagtacgtgagagctgcagtcaatgcagaaacagggtggtaccgcggattctattcgtcccttccggcagtagccggaggggattttttggtgcatgcgcaaagaatggaggaagcattatgaaaacgttacaaaaagcaggcaaatttttatcagattatacttctgcggtagtgattgcaatcgcagtagttacttttctggttccgcagctgatgggctgggtcaattatcagctatttacagatatggttggaaataagtttaccagtcagtctatgattatcggtattatcatgttcagcatgggtctgacactgacagcagaggattttaagatcctggcgcagcgtcctcttgatatctgtatcggtgcggcagcgcagtatctgatcatgccgtttcttgcttttgggatcagcagagtactgcagcttccggatgccatcgctctggggctgatcctggtaggctgctgcccgggtggtgtttcctccaacattatgtcctatctctgcggaggagatgtggcattttctgtaggaatgacaactgtatccacactgttatccccgattatgactcctcttcttgtttcttttcttgcaagcggaacaaagatcaacgtagaaggtcttcccatgtttgtttccattattgaaactgtgattcttccggtgggactgggatttctgttaaatcgtttccttggaaagaaaaaagcttttcaggagattcagaaggtaatgcccggcgttgccgttctgggacttgcctgcgtggtaggcggagttatttcttctcagggctccaacttctttacctccggtgtggtgatttttgtggcagttcttcttcacaatggtctgggatatcttctgggatatggagcaggtaagcttaccggaatgaatacctccaaaaagagaacgatttctattgaagtgggaatgcagaatgcaggtcttgctaccaatcttgctactacaacagcgcagtttgcaagcgctccgcagtcagctgtgatctgtgccgtatcctgtgtatggcattcgatttcaggaactctgatcgcaggattctttgccagctttgacagaaaaaaagaaaaggttcagagtgagaatacagcagcagaatgttaagcggaaatcacattgcgaaggaatataaaataaaaaaactattgacgaatcaaaagattaacgttatactatagcgcagcaacagcaataacgagatgaagtctgcaggaaagaggcttttggcccgccgaaggagtaaaactctcaggtacccgtatttcgggcagaaactgcagatggatcgtttctctggagacatctgtttctaaaacagaggccgaaggtgcaaatgacgcagaagacgtcttgaatctctcaggcaaaaggacagagtatgctatctaaaagcagaacatttttctatatgccttttatctcttttcagaaatgatcttaattttaatcccaaggctgtaaaattttatacagaaggagcattttttaccatgtggagtatgatgaatcaaatccttgtagctgtagatgattttgtctggggcgtacctctgatgatcctgatcatgtcgggcggtgttcttcttacggttcgcctgggccttcttcagatccggcgcctgcctctggcgttaaaatggatgttcaaaaatgaagagggcggcagcggtgaaatatccagctttgcggctctttgcacagccctgagcgcgaccatcggaacaggaaatattgtaggagtggcaaccgcagtgtgcacaggaggaccgggagctcttttctggatgattctggctgctttttttggaatggcaaccaaatacgcagaaggacttctggcagtaaaataccgggttgtggcggcagacggccacagtcttggcggccctttttactatattgaacggggaatgggtgccaaatggaaatggcttggaaagatgtttgcatttttcggtgtatgtgtaggccttttcggaataggaaccttcagtcaggtaaatggtatttccagtgcgatccagaacttttttgatccggaaaaagcaaactgcgtcaccattccgtttctgggcgagtattcctgggcagttgtgatttcttcactgattctggcattttgtgtggctgcgattctgatcggcggacttcagaggattgctacagtcagccagattattgtaccctttatggcagttatttattttggattcagtattgctttgattttatttcatatcagagaagttccggcagcagttgtgacagtggtaaacggcgcttttaatccggcagcggtaacaggaggcgttgtcggaagtatgatcgtggcaatgcagaagggtgttgccagaggtattttttctaatgaggcgggacttggaagcgctcctatcgcggcggcggctgcgcagacaaaagagccggtgcgtcagggacttgtaagtatgacaggtacttttattgataccattgtgatctgcacaatgacaggactttccattgtgctgacaggagcctggcaggtagaaggtctggaaggcgtacaggtaactacctatgcatttcagcatggacttcccattcacccgcaggtggcttcttttgtactgatggtgtgtctggtattctttgcgtttactacgattctgggatgggattattacagtgaacgatgcctggaatatcttacaaagggaaacagaaaaacaatccttgcatatcgctggctttatatttttgccgtatttatcggcccttatatgacggtaagcgcggtatggaccattgcggatatcttcaatggtctgatggcaatcccgaatatgatcgccatgtttgctttaagcggcgtagtggtaaaggaaacaaagagcttttttaaagcccagaaacataagagaaactgatacgtctctgtgacggcagatataggagtgggacgagactgttcctgcttttatatctgccttttctgatgcaaaatactttgagcaggagaaagaacatggtataataggaacacttaatgaatccgggacaaaaaatccagagagaggataagcctggagattgaacaaggctgagcaatgcgaacattgagttttatatccatggtatgataaaaacatttcatgctccggacaaaaaaacaggatgaatccagagaaaatttataaccggatatttaagagttctgaattatgccatttttcggaacatgagcagacgcagcagaaaaatctgcagcttcaggaaagtacagaaagagggagattatggagaaacatctgacagaaaagataagaaaagagcttctggaaatgcaggaccttccttaccgggatttccacgcaaagctgatgcccactgtggataaggaaactgtgatcgggatacgggttccggttctgcgaaaatatgccagaacactggcaaaggaagaggacatcagcagtttttttaatgacctgcctcataagtattttgaggaaaataatattcatgcttttctgatccagcagataaaggattttgaaaggtgcgtggaggaagttgaaaaatttcttccatatataaataactgggctacctgtgatatgatgtctcctaagatatttaaaaagcataaagagcagcttctggtatccgtgcggcgctggatttcatcggatgaaacctatacggtccgctatgggatcgggatgctgatgcagcattttctggatgaagatttcagggaagagtacctggcgcttgcagcaggtatccgctctcaggagtattatgtgaatatgatgatcgcctggtattttgccacagctcttgcaaagcagtatgagaaagcactgccctatatagaggagaaaaggctggatgactggactcacaacaaagccattcagaaatcctgcgaaagttaccggatcacgccggaacaaaaggcttatctgagaactctgaaggtaaaaaaagcccggtcacaaaaaataatacagaggaatagttatgaacaggataatagagattaaagattttcagagcccggagttggacgtttatgcaaggctttcggaggtacagcttttaagagcctgtgagccaaagcccggactttttattgcggaaagcccgagagtgatcgagagagccattcaggcaggatactgcccgatttcttttctggcagaaaaaaaggagttaaaaggtccggcgggagagcttacagaaaaatttccggacattccggtttatacagccccacaggagattctgacacagctgaccggctttgcccttaccagaggaatgctgtgcgccatgaaaagaaaagagctcctgtctccggaagccatctgcgcagacgcacagcgcattgtcattcttgaagatgtggtgaatcccacaaatgtgggagcaatcttccggtcagcggcagccctgaatatggatgcggttcttctgactgcaggatgcagcgatcccctgtaccggagagctgccagagtcagtatgggaactgtgtttcagattccctggaccagatttggaaaaaaggactggccggaaaaggggatgggctgtttagccggtatgggatttaaaacagtttccatggctctttgcgaggactcggtcagtattgattctccggaactgcaggcagaaaaaaagctggcagtgatccttggcacagagggagagggtctggcagccggtactattgccggctgcgattatacagtacgtattcccatggctcatcaggtggattctctgaatgtggcagctgctagcgcggtagctttctgggagcttggaaaaagaacaaaataaaatgcagcaggtttcacagatccaggagaagcctgcataagaaaaacactgtacagacactcagtaaaagagctgctgcacagtgtttttttcgtcagaagatttatttcagtttttcgcctgtaagcatttcatatgcctgaagatatttgtcgatagtcttgtcaacgatctcctgaggaagagtccagtcatgaccgtcattttctttcagccagtcgcgggcaaactgcttgtcaaaggaaggctgaccgtgtcccggttcatatccgtcagcaggccagaaacgggagctgtccggtgtaagcatttcatcaccgatcaccatgtttccgttttcgtcaagaccaaattcaaattttgtatctgcaatgatgattcctttgctgagtgcgtattctgcgcattttttgtacagagcaatggtgttgtcacgaagcttttcagcaagctcgcggccttttccggggaagtatttttccagatgatcaacgctctgctcaaaggagatgttttcgtcatgatctccgatctcagcttttgtggatggtgtgtagattggttcaggaagcttgtcagattctttcaggccctccggcagtttaatgccgcagactgtgccgttttcctgatagcttgcccagccgctgccggtaatgtagccgcggacaatacattcgataggaagcatgttcagctttttgcacatcatggattttccgtcatatttttcattctggaaaaattccggcatatcttttacatctacagaaatcatgtggtttggcagaatatcttctgtcatatcaaaccagaatttagacatctgtgtaaggacagtgccttttttggtaacctcgttgttcagaattacgtcaaagcagctgatgcggtcagttgcaaccatgatcaggctgtcgccgttatcgtagatctcgcgtaccttaccttctttgatcggttttaaattctgcatgtgttcacacctcatcattagatttttgtttttcgtttccctgtaaaaagtagcactgtttgacagtttctgtcaagagcaatttcaaaacttctttcgggttcttttaaaaatacaaaaatacaaagtgaacagtcaaattcaacaggattccgattgaacggggaatttgtttgcagtataataatattcgacaaaaaataaggaggacaccatgatggcagtgtatgagatcacattcagccccacagggggaaccgataaagtaacagaacttctgacggaagcaatggacggcgaaaaaagaaggataagtcttttgccggaaaaggaagattacagcagacatgtatttaaaagcggggatatctgttttattgcagttccttcttttgggggaagagttcctcaggaggctgcaaaaaggcttggaatgatgaaaggaaatcaggcccgggcggttctggtatgcgtttacggaaacagggcgtatgaggacacgctgattgaattaaaagatgtggctgataaggcaggatttgtcccggcagcggcagtggcagccattgcagaacattccattatgcataaatttgcagcgggaagaccggatgaaacagatcagaaagaactccgggagtttggaaaaagggtcagagaatatctggaacatcaggaaaaaacaggagagctcagtgttccgggaaatcatccttacaaagagctggggacgattccttttattccgaagccgggaaaagcatgcaattcctgcggacggtgcgcggcgctctgtccggtgggcgctattgacctgaataatgtaaagaaggtggatgaagagaaatgtatctcctgtatgcgatgtattgcggtctgtccgaaacatgcacgcagcctgaataaagtggttctttttgcagcagaaaagaaaatggcaaagctgtttgaaacaagaaaagaaaatgagctgtttctgggggaagctgaatgacggacagcagaaatcttacagaaaaaagaggaatgaaccgggacatgattaaatatattgccatgatcaccatgcttttgaaccatgtttcctttatttttctggaaccgggaactgtattggctgagatattaacagctgtggggtattttaccgctcctgtgatgtgttatttcctagtggagggaatgacttataccagatctccgaaaaaatatggacagagactgcttttgtttgctgtgatctcggagcttccctattgcctggccatgacaggggaaggaatcataggctttgcgggaatggatatgctgcttacgctgtttttatgttttctgatcataaaagccatgagagagatcatcaatcctctaagcagaaatcttgctctggcagggctgattcttctgtctctgttctgtgactgggcagttcttgcgcctgcgtttaccattctttttgtgaatgcaggcagggatcacagaaagcttaaaagggcgttcctgacaggaactctggtattcggggcattcaacttcctgggcggctttggaagattttctatggacattaatatactctgtacgattctgagtatggcaggaccggctgcggcaggtatctgtatcctgcggttttataacggcaaaagggcagaaacacacaggaatttttccaagtggtttttttactggttttatccggtacatcttttgatactgggacttgtgagagtgcttttgtttgtctgacaaaaaataagctggatctggcaggctttatatctgccgggtaaggctttgtttccggtttgatgtaaataacggacggacataaaatttgataaacagatattaaaaagaaaaaggaatggacagaaaaatgaaaatacttgtagtggaggatgaccttgcattaagcgcaggcctgtgctttgagctggatgccggcggctatctgactgtagcggcatatacagtcagaaaggcagtccagcttttggaaaatgaagaatttgctcttgtgcttcttgatgtaaatctgccggacggaaatggatttgaattgtgcagggagatcaaaaataagaagccgcagcttccggtgatctttctgacagcaaatgatctggaggaagatgtgctgaacggatttgatctgggggcagaggattatgtgacaaagccttttaatatgaacattcttcttcggagagtcgaagttgcgctccgcagggggaagaaggaacagaacacagataaaaatcagtggagcgacggcttccttcttcttgactttaagacgctgactgcagtcaggggaaaggaacggctgcctgttacaccaaatgaatataagcttttgaaggttctgacagaaaacgcggggaacattctgccacgaaaaaacctcctagaacagctctgggatgcaggaggaaatttcattgacgatcatactctgactgtgaccatgaaccgtcttcggggaaaaattgaggatgaagctcatacttatataaaaactgtgcgcggtatgggatatatatggacaggaggggcgcaatgaaagaaaaaaagatcattgcagtgagggtgggagtgcttctcctggctgcacttttttttgctgttttgtactggatcctcagagaaaatgttccgagaaggggagtcagactggcgatccttgtatgtacggcaggaatcagcggcacagcttttttctgggtaaggtttcatcacaggcaggtggctttgtttgctgatgatatctgtgaaatgctggatgccctgatggcaggacgggaaccggaaaactattttccatacgaggattctttgtctgccagagttcagggaaagctgatgcagtactgcgacatgatgaaggaggaagggcttcagaaccgcagggataaagaaactattcaggagcttgtcagtgatatttcccaccaggtaaaaacacctgttgcaaatattaaaatgtttaccggaatcctgaaaaagcacgctctgtcagaggaaaaacgggaggaatttctgtcaactctggaaggacagatcaataagctggattttctgatgcagtctctgattaaaatgtcgcgtctggaaacaggaacctttgtacttcatatgaaagaagcgcctttaagcgaaaccattgccagggcaatgagcggagtatgggcggcagcagaaagaaaacatatttctcttgaggtacaatgccatgaagaactgactgcccttcatgatccaaagtggactgcagaggcagtgggtaatcttctggacaatgcggtaaagtacacgcctgatggcggaaccgtacaggtgacggtagaaccgtggcagttttatacaaagcttacgttttctgatacgggaattgggattgatgaaagtcattaccatgacgtgttccagaggttcttccgggaagaagaggcggcagataaggaaggcgtaggacttggactttatctggcaaacggaatcattaataagcagaaaggatatatcagtgtaaaatcacaaaaggggaagggtacggctttctccgtatatttattaagctgagaggactatttttatggacatcgtaacagtacatcatctgaaaaaatattacggaaaaggggaaaagcaggtgcgggctcttgacgggatcgatctttccattgaaaaagggaaatttacagcagtcattggcgccagcggttccggaaaaacaacacttttgaatatgataggcggaatggatgttccggatgagggagaggtgatcgtggacggcatcagtcttcggggaatgaaggaaaaggaactggcagtattcaggagaagaaaggtgggatttatccaccagaattttaacctggtgtctgcactgactgtcagagagaatattctgtttcctttaagtctggctggcgcttctcaggataagatgcttttccgggagatcacggaaatactgggactggaagacaggctggatgcctggccggatcagctttccggaggcggacagcagagagttgctgttgcaagagcccttatctcacgtcctgccattatcctggcagacgagcctacaggaaacctggactcaaaaaacagccagaatgttatgggatttttgaaaatgtcagtagagacatatcatcagaccctggtgatgatcacgcataatctggaaattgctcagatggcagaccgtgtaatacgaattgaggatggacgtatcttcggacaggaggaaacacatgctgctcaattttaatctgaagatctgccgtactcttgtttacagagaaatgaaacggagaaaaataaagtcatttcttcttgttttttccgcggctcttgttgcaggaatgtatacctttctgttccttctgggaaatgccatagaaggggcttatcttctgaaatttgaatacaattatggatcttccagccacattatttataaagggatgacagagcagcaggcagagtcggtaaaagagaatccggcagtaaaaagtacggtgtctgtttcggaaatcgggactctcacagacgaaatgctcggctaccgttctgtaattcttgctccggcagacgaagcatatgccaaaagtgtaagctctgttccggaaaagggaagaatgccgtcaggcccggaggagatcgctttggatgtatacaccatggactccctgggaattcccagagaacagggaaccccggtttctcttcagtggatggacagggaaggaactacgcatatctctgattttgttctcagcggctggtgggaaagctcagcgaatttcgccgaggcctgcgcgtggatcacagaggaacgggcggaaaagctttgtccgggatttcagaataaaaagacagaaaacaggactgtgggcgtgacactttatcagccggaaaatctggaacagcaggcgcagacaatcctgactgcacagggagccggtgaaatccctttttctgtaaactcatcctatgatcagatgaacaggatgtatgcgcgaataaaaagcgcacagtattatccatctgtgtttctggttctgatctgcgggtttttactgctgtacaatattcttcgagtatcgcttcctgaggaactgcagtcatatgcaggactgaagatgcttggaatgacgcctcggcagatcaggaagtgcttttttgagcaggcatgggcagtaactgttctgtcaatgattcccggctggatgattggctttggcatacattatctggtcacttccagaatgatagagggaatggaagaaaatccggcgttatattttttgagcgcaggtccgtttattctggctgccctttgcacagcggcaacatcaggccttgcctatttttcttttagctttcgtattaacgggatgcttccggcagatgcggcatattttgggaaaacaatgaaaaggcgttcaggaaagaaggggggctggaaaggtgacattgtttaaactggctcttcgttttctgaaaaaggactggaggcatatggtctttgtggcagcgcctctgtttccggcccttctgattctatgtactgcctgggtacagtatatcagttatgatgaggatatttacctgtctgcgtattcgccttgggattatattctgtttgacggatcggctcagatttctgtacaacgttacaatgaaaagaatcagaaccttacagagcgtactgttgaaaaaataaaagaacaggctgaggtgacggatatcagtgttatgaaaacacgtgaaacagagcttacagcttctccggagctccgggaatatctggttgaattttataataaaaaaacggaagagggtatcagccgaaaagagatgatggcaaatcagaagggatggataaatggcctggaacgtctggaaaaaacaggaaaatatacagccattgttgtggggacagaaggggcgtttcttgattatattcttcatgatcagccgatagtccagggagaatttgaccaggaaaagtttttaagcggagattatgcgctgacggcaggagcggtagatacagagcttgcttcccttccggcaggggctcaggtggagatcgcaggaaagaatcttgagattatgacagtagcccaggtggccagtaattttttctgcggagcaaacagcccggacgcagaatttaacctgatttactgtgtgcctctggaaacctttgatcagatgtttcccggacaggcataccggcaggctactgtaaatataaaagagggaaaagaaaaaagctttgaagcctttctcagtcagtatcaggaaagtgtgaatacgggaatcggtttccgttctaaaggggaataccgggaaaatttttatacggcaaggcttaatgaggttctggccttttttatcataggaacagtgatccttgcagccggactgatcaattatggaaacattcttctcacaaagatcattgtagaaaaaagggagtttgcagtgtacgaaagcctgggtatgacagtggggcagctgaaaaaactcctgatcacggagggacttctgcagggaggcgtcctacttctgatattgatcccttctgtatttctgattacctggccggggcttccggtctggttttctcagatgggctcctggtgtatggtttaccgttattctctgcttcctttatggattgccgcaatgattctggtgctgatgtctgttctgattcctcttctgggacttgcggcagtgagaaaaggaacgatccatgacagaatggggatccgggaataaaaaattctaatgttacaaaaatgtacctttgctgtacctttgttttgacattcctctgataaactgtaattacttgagagggagaaaacacttccgcagagaattacaggaggagagacatatgagtacagttttaaaagccagagggctgaaaaaatattatggaaaaggcgaagcgcaggtccgggctctggacggagtggatctggatattgaaaagggggaatttactgcgatcatcggaaccagcggttccggaaaatcaacccttcttcatatgctgggaggccttgacacacctacagccggaaagatttttgtgggaaatacagagctgtctgcgctgaaaagtgaggaggcagcagtttttcgcagaaaacagatcggatttatttttcagaattataatctgatcccggtgctcagtgtatgggaaaatattgtgtttcccatctctcttgacaggcagaagccggacagaagatttattatggagatcgtaaaactgctgggactggaaaagaaactggacagccttccaaataacctgtcaggtggacagcagcagagagtggccattgcccgagctctggcaggaaagccgtcgatcattctggcagatgagcctacaggaaatctggattctcataccagcgacgacgtggttggtcttttgaaaatgacagcaagagagtttcatcagacgattgttatgatcactcacaaccctgaaattgcgcagatggctgaccgtgtgatccgtattgaagacggacgcattgcagccgattaaggaggggatgagaggatgaaagcaggaaaagaaaaaaggtttgacgggatccgtgtgctgaatcagagaaccttccgcaaaaacaggggaagaaatctggttgcagttcttgcaatcctgatgactacaatgatgttcactaccttatttactcttgcgcagagtatgaacaaaaacctgattgaaatgacattccgccagaccggatatgacgcacagacttcttttaaaacaatcgcgccggaacaggcagaacgtctggcggcccattcagaggtaaaagagctgggacagagtattgttctggggctggcagaaaataaacagcttgccggtcatcagacggaaatccgatgggctgatgaaagctatgcaaaacattcctttgccatgccgtcagaaggcggactgcctcagaagagggacgagattgcgctggatacccttactttagacaagctgggagtggaacatcagctgggtgaaaaagttactctggagtggagaaaagatctgtcagctcctgatggggaagtgatttcccctgaatttactctctgtggattctgggaaggaaacgcttccagttattccagtatggcatgggtcagccgggaatacgcagatgaaatgacaggcggaaactataatcaggagggacaggttttaggacagtatatggcgcaggtcaccctgcatggcgacagccatatagaagaaaccatgaatggaattcttgcagataccggaatgacggaactggaatacggtgtaaaccttgcgtattctccggaaatgggagcaacggctctccaggagacacttcctatgtatctgggaatgatcctggtatttattgctggttatctgattatttataatatttttcagatcagtgttactgctgacgtacagttttatggaaagctgaaaactcttggctcctccaaccgtcagatcagaaagctgatctacggacaggcccagcgtctttgtatcataggaatccctgcagggctgattgcaggctggggacttggaatggtgcttgttcctgttcttacaggtatggtagagggaggcggcagcgtctcggcaaatcctgtcatctttataggctccgcggtgtttgcaggcctgacagttctgatttcctgtatgcgcccggcaagactggccagcagggtttccccggtagaagctctgaggatgaatgatgcagatggaaaaatcaaaaagaagaaacgccacagaacaggaagtacttctctggaagccatggcctgggcaaatcttggaagaaataaaaaacgtaccgttacagtaatctgttccctcagtctgggactggtgcttttaagctgcttttatgcaaaaagcgcttcatttgacatggaaaagtatctggcggatctgactctttcagattttgagctggaggaggttacaagtgaagattatataggaggctacgatccaaaaggaaccaccttaaacagtgagctgacagaaaagctggaatccatggaaggagtggaggccttaggacatcagtattctcatcagtttatatgggaaatgaatgaagatacagttcagaatctgaaggatttttatacggaagatatgctgaaagactggtctgaatatgatccggaaggaccggaacaattcaaaaaagcagtagataccggagaggccaatgcagttgtatatggactggatgggatcccgctggatggaatcactcaggaaaagtatcttatggacggagagtttgacggggctgcttttgccggaggcgattatgttcttgcagttggtccggcaaatgacccggggcagaaattgcctgtacttcccgcgccgtctgtgggaagtaaaataactcttgaaggaaaggaatatacagtaatggcagtggtgtatcctctgatgcctgtagacaatggcgcatcagaagtgggcgcgccgaatgctatggagcttcattttattatgccttcagatacattccgcagtctatggccggaaaatacactgcgcagattatttgttaatgtagatgacgctcatctggagcagactcaggaatggttggatgagtatacagaaaatgtggatagcagccttccggttacatcaagacagaccatggcagagcagtatgagaaggagacacgttcttctgctgtaatgggaaatgccattagtatcattattgctcttgttggaattttgaattttatcaattctatggtaaccgccattgtatcacgaaaaagagagtttgccatgatccagagtgtgggaatgacaaaacggcagctctgcaggatgctggtatatgaagggctttattatgcagggatcaccctgatcgtgtcttatgttctcagctcttttgcagtgggagttgtgatccgggctatggtggagggcggttttactactttccgttttacccttctgcctttacttatctgcacgcctctgcttttgatctttgcagttctgattccctgttgctgcttcagaaatctggaaaaacagagcattgttgagaggctgaggatggaataagaaaacaaaggttttatatggaactgctgctgtacaggaaatattgttaaaagaaaagagcacttcacatataccggttcctcaatggtcgaaactgaactcagaccattgatgcttacaggaaaaatgtgatcagcgctctttttattttttcggaaagaactgttcaatataagcggcggtctgactgataaatttttctgtatcaaggtgatcgttctgtattgtttgatgcatggaaagaccgtcagaaagaaggagaagaagccaggaaaaatattcgcctgaaaccttgtctgtacgttctgaaatttttttggcgatcagagaagcgaaacactgatagcggcgtatcagatgagtccttatttcctcattgccgatcatagcatcataaaaaagaggcaggcggagtttgacaccggctacgtcgcgttccagaacataacggacaagacggtgaagggaagtatctttatctgcattgtctgtccactgacaaagctctgtccactgctcgtccagatatttgtctgtgatcgcaaataacagttcatttttgtttttaaaatgatagtagagagttcccttggatattcccgcttcagatgcaagctgagaaagagaaatctcagaaaagggtttttcttccagaagtttttcggcggtactgacgatcagactgcggacatcttcttttctgggtgcggccattaagttacctcctgaaaatagttgattactgttcatttattgtaacgtgttttgggtgttttgtccataaacattaaaggaaaaagaatgttccggatgcggattcagagcattgttttatggaaggatgtggatatattttatattaaagtgattgaatatatcatgtttttgttgactttgcataaaaatatgatactataaaagaaaaagtcgtacatacgaccgacttgtgaaagaagggatatgagtggattgtcagaagcttcaaaaaaaggtacggagcatctacggaaacagtatccgggtaactgagaaggatggaaatatagttctgtccggaactctgaaaaaatgggaggatattgtaggggcctgctctttgtgcgtggataaaaagagaagatatcatgtaatcaataatctgaagctggaaaatacagagcttcccaaaatgaaacttcctcatattcaggatcaggctctggaaggcagaaaaccggatgttctggtgatcggcggcggaatttcaggcgccagtattgccagagaactgatgaaatggaaactggatgtacttctggcagaaaaagaaagtgatgttgccatgcatgcttccggtcgcaatgacggagaagttcatccggggatcgatcttggaaaaggaactctgaaacagcattacgtgattgccggaaaccggatgcatggaaaaatctgcaaagagctggacgtaccttttaaaagatgcggtcagtatgtgggtatgatgcactggagcgagctgcttcccgcatatctttatgcatgtcagagaaaatacatgtgcggtgtttccgatacacgggtgatttcaggaaaaactctcagaaagcgggagcctcatctgaatccggatatgaaatttgcaatttataacagtatggcaggaagcgtctgcccctatggtcttaccattgcctatgcagaaaacgctgtgcagaacggggcggaggtggctttgaatacagcggttttgtctatggatgtaaaagacggaaaaattagaagtgtgcttaccaacagagggcggatctatccggagatcgtaatcaatgctgccggagtttttgcagaagatgtggctgaaatggcaggggacagattttattctattcaccccaggcggggaaccaatgccattctggataaaaaggccggaaaacttatgggcgggatcgcctcctggaaaactcttaaaaaaacttccggccatacaaaaggcggagggattgtccatacggctcatgataatcttctggttggtccggatgcagtggaaacttatgaaaaggaaaattttgcaacccaggcatccagcattgagaataattttaaaaagcagcagggtactgttaaagaactgtcccagagagatatcattacatattttaccggggtaagagctcctactttcgaggaggattttgtaattgagcggggcagaaaaacaaagaatctgattcactgtgcaggaattcagtcgccggggcttaccactgctccggcagttgcaaaagatgtggcgaaaatggcggcaaaaatggtatcagcttcacatccggtaaagaaaaatgagagctataacccttacagaaaaggtgttccgagacttcgtgaaatgtctccggaacagagaaataaactgattcagaaacgaccggattacggggtgatgatatgccgctgtgaggaaatcagcaagggggagattgtggatgcgctgtgttcgcctcttcctgtatatactattgatggagtaaaaaagagggtacgtccgggaatgggacgctgtcagggcggtttctgtatgcctcttgtggcggaaatcatcagtgaggtcacaggccagccattggagaaagtgaaaaaaagcggcggtgacagttatcttttattcgggaaaacaaaggcaggtgacggaaaatgatttatgatgtgatcgttatcggcggaggcccggcaggacttgcggctgcaatagccgcaaaaaaagaaggggcacaggttcttctgatcgaaagagaaggacggctgggaggtattctgaaacaatgtattcatgatggcttcggtttgcagcgtttcaaggaaaagctgtccggaccggagtatgcagaacggtttattgaggagtttcacagtctggaaattccggcgaagctgtggacgtttgttacaaagatccggaaatcagatcaggattttcaggtgtggacagtcagcagaaatggagtggaaatgctggtatccagaacgctgattctggctacaggctgccgtgagcgtacagcaaaacaggtatccattcacggaacaagaccggccggagtttatacggcagggacagcgcagcattttaccaatctgcagggggtgatgcctgcccgaagatgtgtgattctgggaagtggtgatatcggccttatcatggcaagaagactgaaactggaaggggcagatattctcggcgtttatgaggtgaagccggagccttccggacttaccagaaacatgatccagtgcctggaggattttgatattcctcttcatttatcggaaacagtcacaagaatatttggggatgaccggctgacaggtgtggaaattgccaaagtggatgaacagatgcagcctgttccgggaacagaaaagagaattgactgtgataccctcattttatcggttggactgattccggaaaatgaaatggcagaaagtctccgggttactatggatccccggacaaaaggccctgtctgtgattcatgggccatgacggatgtgccgggagtattttcctgtggaaatgcttttcatgtcaatgatcttgtagattatgtgtcagaaagcggagagctggcaggaacttctgcggccagatatttcagagaactgaaaggagaggctgacagaacagcggaaaactggatttccgtggagacagaaggagggcttgcttatgtggttccccagaagatacggaaaagcgatctggacaaaaagcttgttttttatttccggtgcagaaggactatgggagaaagtatgcttgcagcgatttcagcaggaaaaacagtttttgagaaaaaatatcaggcagtaaggcctccggaaatggagcgggttgtcattgatctgtcaaaagcagacatagtcggaacgtcccttgtttttcagcttggggaggtgcaggcatgaaggaatttgtttgtattacctgccctaacagttgccctatgcaggcagagttggaaaatgggcagtggaaggtaactggaaataaatgtaaaagagggcagcaatttgcggaaagtgaaatgacctgcccaaaaagaactttttctactacggtaaaaactgcctgggattcagttccggtgattccggtccgtgtgtcccgggagataccaaaagataaaatttttcagattatggaagaaatcaatcatatgacggtcagaaaatccatgggaaggggcgatgttcttattcctgacgtacttggccttcatgcggatgtgatcgttaccagcagtgttctgaaggagtatctggaggaaaataataaggagaatacctatatgcacaaagactgcgcgcaggaaggaggaaattatgagtaagccatataaaggatttgagccgaaatgggtgaaggaagcagcgcctacagacagctggcgttctgtattcagatggggagatccggattttgtaaaatatccaaaagaatctctttacaaaatgatgaaagaaaaatttaagatgacagatgacgatttccgacattatgacggaagcatcggaatggaaaagatagaacttacaaattgtccggtacgtctggagcagaagcatatagatgctctgaaagagatcgttggtgagaagtatgtgcgtacagacgattatgcgagggtgtctgtagcctatggaaaaacagcctatgacgccatgcgtctgagagaaaaacgtctggattcacttcctgatgcagtggtttatccggcaaaaacagaagaggtagaggctattgtggcttattgtaccaaagaaaaaatccctctttatgtttacggaggcggaagcagcgtaaccatgggtgtggagccggtaaacggcggaatctctctggatatgcgtctgcgttttaatgaggttgtttcttttaatgaaacagatcagacaattactgttcaggctggaatgtcagggccaaaacttgaaaaaatattaaataacgcacagactgtttttggagccagacgcgcctatacctgcgggcactttccacagtcctttgagtacagcagtgtaggcggatgggttgtcacaagaggagccggccagaacagtacttactatggctgtattacagatattgtgctgtcacaaaaatatgctacccctattggcaacatacagaccagtcactatcccagagaagctaccggtccgaatctgaaccagatcatgatgggaagcgagggggcttttggtgttctgacagaggtgaccttaaaggtattccgctacatgccggaaaacagaaaacgtttctcctatatttttaaaaactggaaggtcgccatggcggcagccagagagatgatgcagtgtgaggcaggattttcttccgtattccgtctgtcagacccggaggaaacaaaccttatgctgagactgtataatgtggatgagacgccgctttggaaacttctggatatcagaggctttcgggatatggagcgctgtctgtttcttggatttacagacggcggaaagggctattccaaaaatgtggctgcaaatatcagaaggattgctcataaatataaagcaatgagccttacctcctacgttacaaaaagctgggaaaaaggtcggtttaatgatccgtatctgagagataccatgatggattttggtattgttacagatacactggaatgtacggtgaactggtcaaatatggcaaaggtacacagggaagtgagaaaagtctgccataagcttccaaataccattgtgacaactcacatgtcccactgttatccacagggggcaaacctgtattttatttttattacaaggatgagcggagcggataaattccgggcatatcatacaacgattcttgatgccattcagaagtccggggcagcgatcagccaccaccatggaatcggaaaaatgtttgcgccgtggcttgagggaagcctgggacatacagagtacggtgtgtttaagattctgaaggattattttgataaagactatctgatgaatccgggcggcactcttggactggatctggatgaggataaaaagaaatacctgaaagaagggattacacgctgatctgcatagggagggagtacctgtgaaaaaaacatcagttgtccttgtttttgatattggaactcagagtacaagagctcttcttgtttcctcggaagggaaaatactggcaaaagcccagaagggccatcatccggcttatgtttcaagaaaatccggatgggcagaacaggatcccgatttttattaccagaatctgtgccgtgtttccagacagcttcgggagagctttccggatatttttgctcagatccgggcagtaacgcttacaacgatccgttgtaccagtgtctgccttggacgggacggggaacctttgcgccctgcaattttatggctggatcagagaagagctttaggtacgcctgcgctgaagccctggatttctgcagcggtaaaagcagtgggaatgacaaaaaccttaaatctccaataccagaaatctcattgtaactggattcgggaaaacgaacctgatatctgggcaaaaacaaagaaatatgttcttctgagtgcatatctgaattacaggcttaccggaaggctggcagattctacggcgtccatcgtgggatatgttccttatgattttaaaaaccgttgttggaaaaagaaaaatgatctggttcggcctgtttttgatattccggatgaaatgatgtgcgagctggtggatcccggcgattatatcggctctcttacagagactgctgcagaagatctgggactgaataaggatctgaagctgatcgccactggtacagacaaggcctgcgaaattctgggtcttggctgtgtcaataaaaaaaaggcggctttcagttttggaaccacagctacggttacgtttaccacttctgattatctggaaccggaaacgtttataccgccctatgattctatccttcccgggcattatactccggaaatagaaatcttcagaggatactggctgatttcctggtttaaaaaagagtttgcccagaaagaagttatggaagcgctggagtcagatattcagccggaggagcttctgaacagacgcctgaaagagattcctgcaggctgcgacgggcttttgctccagccgtattttacaccaaaccttaccatgcctgaggcaaaaggttccgtaataggtctgtcggatgttcataccagaatccatttttaccgggcaatcatagaaggaatcaattttgccctgatggatggaatgcgtcatatggagaaaaaaggaggatttcgttttgaagagattcgcgtaggcggcggaggcgctcagagcagtgaaatctgtcagatcactgcagacatgttcggtttgccggtagtaagaactcagacttatgaagtgtcggggatcggcagtgcgatttctgcatttgtgacgctgggcgtgtttgaggattacagagaagcattgaggtgtatggttcataaaaaagatgtatttaaaccaaaccggcggcagcatgcagtataccggaaactttatgaggaggtatatcagcagatatatcccagcctgtcaggaatttatgaaaaaatgagcaggatcaaatgatggagaaagtctgttaaaagccggatgagttccggggctgccaggaaaatacaggaactgtaaaagcagaatataaaatcagaaacagcgcgtttctgtacagaaaaactccggggaaggggctgtcgggaaatagatagttccaaacaggagcagatttggctcatgggagtcaaatctgccccttccccggaagttttttgtattatttaaagaagtattagtgattcaagtatataaaaacataaagcttacacggaacaaaaatcggatacagaaggctttttctatttcacagatatggtataaaactgtttgaaggtctctccggcagccagggtgttgatgtcctgcttggaagaaagctcatcggcaaagccggtgttgtcgcagcgtcccatccagggttccaggcagacgaagggagagtccggcgcgctccagataccaaagttcggaaatcccttacaggtgatttccacataaggagttccgtccggaaaggcgattcctgcccgggttacctgcccgttgtcaaataccagagtatcgttgtcaaaaagctctcttttgatatgacagcgtccgtgttccagagcaagcggataggtttttccctcaaatacagttccgtgggaaaggtccaggagactgcaggtaagctctgattcatggttaaaagtaagataatactgatcctgggaagtacccggaaccgcaggcacattaaaggcaggatgtcctccgatagtaaagtacatggtctgagaatcctcattgatcacggtccagcgtacagtcagatctcttccggaaagctcatgggtgataagaagacggaaatcaaaaggataagtttccctggttgaatcagaagaggtcacaagatgggtgacagaggtctgtgaggactctgtacaggtaaattccatatcacgggcaaatccatgctgtccgcagtggtaggtgtttccgttaataagacatttattttcataatagcggcccacatttgggaacaggacaggggcatggcggttccagtaagaaggatctgcattccagagtacctgacggtcatttgttttgtcatagatttcagtcagctcagcgccaagatcattgatctgtacccgaagctgatcgttttccagtgtacgaatcatgatatatcctccaataaaaaatttgatgtatcaagtataccagatttctgaaaaaataacgagaaaaactgcacaaaaataagaataaaaatatgttgttttttacttggcactcaattgcaggattaaattccaatcttctgtggaatttaatcctgcaaatctatcttctcttaaccatggaatttaatttttccaaacgttctgttaaaaccattctataaatatggctattcctcccggcagaaaggaagtccttatgaataaacaaaaacatttaactcttgcttcacgaattatcattgaagccatgttaaacaaggacgaaagctttaacgcgattggtcggtttttaaacaaggattgcataaccatctccaaagaagtgaaaaatcacatttgttttgaaaaaagtggagtctacggcagaaccttcactgattgatgactgacttttctgcatcagtgctctgcacgataacgtataattaatttcgcaaattcaatttcataaaaacagacatggtctatagccgtttggtagaataaagttaccacacaaaattcaccataggaggtacagaacgatgtctgataactttatacaactcaatgaagatttaataaagcacgatttaaagaatcttgtccgtagcagcgtcgaggaaactctgtccttctttttatgcatatgacaacaaaaataagagccatcagatttgattttctgttggctctttttaatgttcactgtccaatggattagtcctccttaaatttttataaaacattctggaattaagtttgtgttctcggtggtctgtaccttcctttcatagattatgatgaattattttacgtttctggtggtctgtacctccttgttgggttatgagatttcgtttatgttttcggtggtctcactcctttttgatttatttttaagttccttttgttttatgagcttactataacagataaaatgagatttgtcaataagaaaattgataaaattaaaataaatattattttaactgctaaaaataactttacacacataattaactgaaaatattgatgaattccggtgaatagaaaaagggattcaggataagataggattatcaagtcttaggaggtaaaaatatgttgcgttatttacctgtacgcagaattcacgcaagacaagtcctggactccaggggaaatcctacggttgaggttgaagttacagcaggagaagggattgttggaatccatggatatacagcaagagccatagttccctccggggcgtctaccggaagatttgaggcagtggagctccgggatggtgaaaaaggaaaataccttgggctcagtgtggaaaaagctgtaaataatgtaaatacaaaacttgcggaagcaattgtgggagaaaatgcgcttgatcagatgaatatagacagacttctggcagaagccgatggaacagacaataaaagcagcataggagccaatgcagttctgggtgtttctctggcagtggcaagggcggctgcggaagctttgagaattcctctttatcaatatctgggcggctgtcataccagaaagctgcctgtgcccatgatgaacattctgaatggaggacgccatgcagataataccgtggatcttcaggaatttatgatcatgcctgtgggggcggaagatttttcagaaggaatccgcatgtgcgtggagatctatcagtttctgaagatcattctcaaagaaaaaaatctgtctacagcagtaggcgatgagggaggctttgcgccggatcttgaggattccagagatgcgctggcgctgatcatccaggcagtggaaagggccggatacgaaccgggaaagcagatcgcgattgccatagacgcagcggccagtgaattgtatgaagaagaaaaaggggtttactattttcccggagaaagcaaaatgaaaggaaaagatgtattcagagactcttctgagatgattgaatattatgagggattactggaagaatttcctgtggtatctcttgaggatgggctggaggaagacgactgggaaggctggaagaaactgacagagcggctgggagacaaaatacagctggtaggagatgatctttttgtaacaaataaaaagagactgacctgcgggatccgacttcaggcagccaatgcagtgcttgtaaaagtaaatcagatcggtactctgacagaggctatggatacggtccggctggcgcaggaaaacggataccgggcagtgatctcccacagatcaggagaaacagaggattcctttattgcagatctggcagttgccacaggtgcaggccagataaaaacaggagcgccctgccgttctgacagaaatgcaaagtataaccagcttctccgcattgcagagcagcttggcgagaatggagagtatcagaatccttttaagggattttcggaggaaactgtatagcagcaggcaggggactgttatatgacaaaagcagaatgtatttgaaaataaaaaatcctccgcggcgcttttggcagaacggaggatttttattttgtcaggaaagtaacacattatgtgctgatcttcccggtaaataaaaatgctttgttcaaaaacaacgtacacattattattttaaagtaaaatactgaagtacagctcctttaaattcaaattcccgggaaatttcataggtatccagaagccactggcttttttctttggagctgtatttttccagacggctgatggttccctctccggcaagaaaggcaggaatttttttggctttgatatcatccataatatagtctcctgcctccggtctcagagaaagatcggccagatccagcgtatagcatccagtatcccagcggaggatggaataaatctccggtacaccgattccaaaggcgtaggtgttttccgggatatttgcagcaatatgggcggcgaaatcattcagttcctgctcattgtggagttcctctctgagagctgtgttctgaccgtactgaatgatgtttccggtagagacggtcatcagaacaagcagggaaacagcagtaaaagtacctttaaaaatctgcattccgctgaaactgttcatattttttatgcggaacgtctggaaagtattcattccttcttcagcaaaaatacacagaagcagaatacatggaatgtgaatgatctccagattgtgataagccgctctgttgataaaatatgtgatctgccctaatgaaaggacagcggcagcaaaagtgaagcagacgcgaaggagatgacggctgtctgtttcatcctgtgcgcggacaaaacatatgtgggaaataccccatgcgcaggccataaaaaacagcacaaggattatcatataggcgcttgcaaactccggaagatccactcttaacagaccatccatgtaagaggactgaagaagtgggaaaaggaattcgcggattccggtaatctgtcctccgttcattatgttatacagctcaaccacagcataggcgcccagaaagctgagaaggatccctgcaaggtgcagaagacaggtttttaaaaccggcagccgggagtcttttttgtggcagaggcagcggaggatccagaatgctgcccaggaaatcgcgcagaaaagtcctgtttctgtattccacaggattcccagaagcgaaagcacataccccagaatacagatgagacggccgctttttttgaaacggacacaaaaggcaatccagaaaagcatcaggcacataaaaaggattctgtgtggccatagctgccagtagattccgcttctcatggaaagaacgggaaaggtcagggcaatggagcccagaactcttaaaagatcattttttacaataaaatgaagggtcagaaaagctgcaaggaaacaaagggcgccgatgatggtattcagaagaataaaatcaatcagatcgcctccaaggatcttcatgggaagcttgtataaaattccgtagtgaccgtaaatactggtggtatattccgtgtaagggcttccgtgcagtacattatatatggaattgaaatatgcatccatatgaagacggtccggttcgtttctgagaaaaacctccggggtataaaagttataggcaaccagaagagtgagaagcccatagaaaagggacatggcccaggtttttacagaaaagttattatttctggcaaaatgaagaaaaacgagcccttctgtcacaaggcagatcagtacaagccagaaaggaatggaatgccagacgtatcttgcggaaacagaaccgtaaacatctacttccaggcggtacatgcggacaaagaaaagaatatttaccgttataagaagtactactgtaaaaaaagcgtttctgggcgtgtcaaaaaagcagggcttctctgtgcgtgccagaagaattgaaaaaataagataggaaacgcagaataaaataactgtcattgcataagtgagaagatttacatttccaatggaactgacagccgctgacagagccggtattctgaaacagcatactgcaaagccggcagacagtataagagaggcaaaaaaagccataattctgtttgttgaagttttcatgttgaccatcctttaaatgtaataggtttcataaaacagcataagccattcctgtatatcatccccgaaagaagttctgttgtcaaggtttttagagaaaaactgttgaaatcccaaaagccatatgatacaataaaaaacagttgattaggaggtgtaacctgaatggagatcttaagaattatccttacggtaatttttgtcttagattgcataggtcttacagtcattgtactgatgcaggaaggtaagcagcagggacttggctctattgccggtgttgcggatacctactggggaagaaacaaaggacgttctatggagggtggtctggtaaaggcgactactgtcatggcaatcctgttttttgttctggctgtcattttgaatatgaatttctaagaatcatggaaggcaaaatggagacactcttgtaaattcgcaagagtgtttttttgcctgagtacgcagaaacggcagttctgacaggactgtctgtgtttacagaaaaggagttcaagtgagcagaaaaaaaatatgggaaaagaaaaaaagattcccaaaagaaaatcgcgcatcatttaagaaaaaaaacataaagagtctgaaaaaacagggccttctggcagagggcgtttttatcggaaatgccaggggctttggatttgtggaaacaggagaggatgaagaggatatttttattcctgcagatgctgtaaatacagcgcttcatcaggaccgggtacaggttctgctgaaaaaagaacagaagcctggaaagcgcagagagggaacggttataaaaattctggaaagaggtaccacagaggttgtgggaacttttcagcgagaaggagattatggctttgtgctctgtgataaccagaaaatatcccgggacgtttatatttctccgaaaaattctcatggaatcagagatggagaaaaggtagttgcccagatccttgattatggctctgagaagcgtaagcctgagggaaagattacagaatccctgggaaatatccatgctccgggagcggatattctggctgttgtaaaaagctatggcatcccttctgaatttccggtccgtgtaatgaatcaggcaatgagagtgccggatcatgttctggaagcggactgggacggaagagacgaccttaccggacttatgacagttaccattgacggtgaggatgcaaaggatctggatgatgcagtttctcttacaaaggaggggaatctttatcatctgggtgtgcacattgcagatgtaagcaattatgttcagggcggaagcgcaattgacagagaagccctgaaaagaggaaccagtgtttatctggcagaccgggtgatccccatgcttccggagcgtctgagcaacggaatctgttcgcttaatcagggtgtggagcgtctggctctcagctgtctgatggatattgatgaaaacggaaccgtagtatcccataaaattacagaaagcgtcatacgtgtagaccgccgtatgagctatgaacaggtgcggtgtattctggaagacggagaaacagagaccagcagagaatatcaggaatttgttcccatgttttttctgatgaaagagctgtccggaatcctcagaggatgccgccacaacagaggctccattgattttgattttccggagagcaagatcattctcaatggggcaggccgcgccattgatgtaaaaccctatgaaaccagtgtggcgacagagatcattgaagactttatgcttctggcaaatgaaacagtggccagagaatactgtaagggcgaatatccttttgtttacagaacccatgaaaatccggatccggacaaggtggaggagctgctgatgcttcttcacaatcaggggatcgacgtgcggaaatccggacaggagatcacgcccaaagagattcaggaaattctggaaagcattcaggatcttccgaatgagacaatgatcagccggcttacacttcgcaccatgaagcaggcaaaatataccacggaatgcagcggacattttggtctggcggccagatattactgtcattttacttctcctatcagacggtatccggatcttcagatacatcggatcatcagagataatctcagaggaaggctgacccgggaaggaaagacagagcattatcgggagattctggaagaggtggctcgtcagtcaagtgtgtgcgagagaagagcccaggaagcggaacgggaatctgacaaaatgaaaaaggcagaatatatgtcctatcatctgggagaggaatttgacgggatcatttccggggtgaccggatatggcctgtatgtggaacttggcaatacagtagagggactggttcatattacagctttaaaggatgattattatacctttgatcaggagactcatgaactgagaggcgaactgacgaaaaaagtatatcatctcgggcagaaaatccgcgtccgtgtggcagatgcggatgcggtaaaaaggtctgtggattttacgattgcggaagagcaggaggaataagctatggcgaagaaacagggaatcagactgattgcaaataataaaaaggcttttcacgattattttatagaggatacctttgagacagggatttcgctggcaggaactgaggtgaaatctctccgtatgggcaaatgcagcataaaagaggcttttgtcagaattgaaaaaggcgaggtctgcatttacggcatgcacatcagtccctacgaaaaaggaaatatttttaacaaggatcctcttcgtgtaagaaagcttctgcttcacagatatgagatcaataaactggaaggtaaattaaaggaaaagggcctgactctggttccccttaaagtgtattttaaggacagccttgttaaggtggaaatcggtcttgcccggggcaaaaagctttatgacaagcgccaggatattgcaaaaaaagaccagaggcgtgaagcggaacgggattttaaagtgaaaaatctttactgatatattatataaagaagtgctgttgtcagacaggtacaagatcagaacggacatgggctggctgttttgtttacagaaccggaaactgtttctgcgaatgaagtgaaactgaacagaatcgaaagtcttaaaattgtgtgaatttacctgacatttagttgacaagaaaaagatactaagtataattatagtaatgaaactatgttcagagatttccattaatacgaatgggaggtttataatatgaaaaaaagatatcttgcaatagccggattgctggtacttgcagttgtagcggccggctgtggaaaagagaaggataaaccggccgaacagcaggttcaggcaactccgacagttacgccacaggtgacagaggctgcagatcttgtagatatggaagtatccgatgaaaaaaatgtgatcggagaaaaaaccgccacagcttctaaagttgcgatcgttaaccggacaggctcggaaataggagctatttatatccgtcagcatccggaagatgaggaagagacagatgatgacgagtggggcgatgatctggtagacggaatgtttacgctgaaaaacggggaacaggcagtatattattacaagaagccttcttccgcaggaattacctatgatatccggatcacctatacagacgaggataagaatgagtgctttttccgggatcttcctcttgcatccatgaagcagatcactcttcgcatgagcggaaccggtgaggacagcattccttatgctacttatatgacagctacaggcaaaaaagagatttccactcttaaggatgtcaaggagcgtctgggactgacagaggatgaggaggatgacgatacagataatccggatcctacatctgcaccgaatcccacatctgcgccggatcctacatccgcaccggatcctacacaggctccggatgatggcgatgatgatccggatgatactcagcctacggacgataccattgacaaggcaaccggatatatcgggcagtccatggatgatctgatcgcagcgatcggttctcctcagtatgatgaatatgaggatgagccggatacaggaaaaaccggctaccactattattcaaactttacggtatcaactactgtagatgaggatggcaatgagattgttaccggcatctggtaaaagtcttttgtacgaaaagaaacaggagaggataagattatgaagcgtattttactgaaattaagcggagaagctcttgcaggagcaaaaaagaccggttttgacgaggagacagtaattgctgtgtccagacagatccgtaccattgcagaagagggaactcaggtgggaatcgtgatcggtggaggaaacttctggagaggacgtacaagcgagaccatcaaccgtaataaagcggatcagatcggtatgcttgccacagtgatgaattgtatttatgtttctgatatctgcagatatctgggacttgaaacagaaatttttactccgtttgtatgcggagcatttacgaaactgtattccaaggatacagtggaggaagcgtttaaggcaggaaagattctgttctttgcaggcggaaccggacatccgtatttttccacagacacggcaactgtgctgcgtgcagtagagatcgaggcagaagccatccttcttgcaaaggcagtagacggaatttatgacagcgatccaaaggtgaatccggaagcagtaaaatacgatgagatttctattgaagaggttgtagacaagaaactggctgcaatggatcttacagcatctattatgtgtcttgagcagaaaatgcctatgctggtgtttggtcttgaggaagagaacagcattgtcaatgcggttcacggtaagttttccggtacaaaagtaacggtttaagctgccgtatatgatgcagcgaggctgcaaaaaacaaggagagggagattagacaaatggatgaaagagttcagaagtatgacagcaaaatgacaaaaactttaaacggatttgaggcagagctttctacaatccgtgcaggacgtgcaaatccgcatatccttgacaagatcaccgtagattattacggaagccccacaccgttgcagcaggtggccaatgttactgtgcctgaggcacgtatgattcagatccagccgtgggaatcaagccttatcaaagagatcgagaaagcgattcttacatccgatcttggactgaatccaaacaatgacggaaagatcatccgtcttgttcttccggagcttaccgaagagcgccgtaaggaactggtaaaggatgttaagaaaaagggagaagcagctaaggttgctgtccgcaatgtccgccgtgatgccaacgacgcatttaaaaagcttaccaagcaggatgtgtctgaggatgaagtaaaggatctggaaaacgaagttcagaagctgacagataaatatatcaaagatatcgaggcagcagtagataaaaaagcaaaagagatcctgactgtataattaattcagcgggaaagagaaaggagagctgtaaaagatagctctccttttgccataacataaaaattaccgggaggagcggcaatgagagtaccgaatcatatagcgatcattctggatggcaacggacgctgggcaaaagccaaaggaatgcccagaagctatggtcatgtaaagggctgtgcaaatctggaaacgatctgtgacgatatgaaagagcttggagtcaagtatctgacagtgtatgcattttcaacagaaaactggaaacgctcgagagaagaagtggattccttaatgaacctgttccggaattatctgaaaaaatgtataaagatttccaggaaaaataaaatgcgcgtgcgtgttctgggagatattactgcttttgatgaggatatccagcagaaagtcagagagcttgaggaattttcaaaggattatgaggaactgtttttccagattgccctgaactatggcggacgtgatgagattgtaagaggtatcaggaagcttgcgcaggatgcagtggacggaaaggtcagtcccggggagatcacggaagacgtttttgaaggatatctggatacggcaggtattcctgacccggattttctgattcgtacaagcggggagcagagactttccaattatcttctgtggcagcttgcatacacagaattttattttacagatgtggcatggccggattttcataagccggagctgataaaagccatagaaaaatacaacgaacgagaccgaagatacggcggagtgaaggaggagtagacaatgtttaaaacaagactcttaagcggcattgttctggtgatcattgcccttttgacgatcatgagcggaggatatgttctgcttctgacactgctgtgtgtttcgctgatcggcatgagagagctgtacaatgccatgggcgtgcataaaagcggaatggatcttctggagctggccggttatctgggggcagttctttattatggcacagtttttctgggatttgaaaaatatggaatgatggcagtaatcctttcccttgtgcttttgatgtttgtctatgtatttacctatcctaaatatcaggcagaacaggtgatgtctgcatttttcggactggtatatgttgcagttatgctgtcttttatcctccttacaagaaatctggaaaacggacatcttcttgtgtggctgatctttttctgttcctggggctgtgatacctgcgcatactgtgtgggcgtactgatcggaaaacataaaatggcgccggtgctgagccctaaaaaatcaatagagggagcagttggaggagttgcaggagcagcaggtctcggagctgcctatgcggcaatcattcatgccccggtagtggaatatgcggtgatctgcgcagtgggagccctgatttccatggttggcgatctggcagcatccgccattaaaagaaacagaggaatcaaagattatggaaagatgatcccgggacatggaggcattcttgaccgtttcgacagtgtgatctttactgctcctgttatctattacatggcaaaatttattctgggtatataaaaacagattacaaaatatcctataaggagtcaatatgaaaaaaattgcaattttaggttctacaggctctatcggaacacagacactggaggttgtccgtgccaatggagatattcaggttctgggaatcagcgccggaagaaacataaaaaagctggaggagcaggcaagagaattttgtcccaggcttgttgctgtgtgggaggaagatgcggcccgggaactgagggtaaagcttcaggatacagatgtaaaagttgtttcaggaatggaaggacttctggaactggcttctatggaagaaacggaaatcctggtaactgctatcgtgggaatgctgggcatccgccctaccattgaggcgatccgggcaggcaaggatattgcgcttgccaataaggagactcttgttacggcaggccatctgatcatgcctatggcggaaaaatacggtgtcaggatccttcctgttgacagtgaacacagcgcagtgttccagtgcctgaacggagaacggcgggaagaaatacataagcttctgatcacagcgtccggcggtcctttccgcggcagaaaaagaaaagatctggagcaggtgactctggctgatacgctgaagcatcccaactgggtaatgggacagaagatcacagtagattctgcaactcttgtcaacaagggactggaagtgatggaagcaaaatggctttttgatgtggagcttgaccggatccaggtagtggtacagcctcagagcgccattcactctatggtggaatttaaggacggaggtattatggcgcagctgggaacgccggatatgcgtctgcctattcagtatgctctttattatccggaaagaagatacctggacggtgagagacttgattttgcaaagcttgggcagattacctttgaagagcctgatatggagacttttctgggacttccaatggcaattcaggcagcccgggagggcggttccatgccgactgtttttaatgcggcaaacgagcttgcagtaaagaaattccttcatgaggaaatacgttttctggatatttatgatattatcgggcagtctatgggaagacataaaaaaacagagtctcctgatctggatgaaatcctggcagtagaaaacgagacatatcagtggattgaaagcaggtggtaaattgaagattctgattgctgtcattatattcagcgtgattattatcatacatgagcttggacatttccttctggcgaaaaaaaacggaattgtggtaacagagttttctcttggcatgggtccgcggcttttcagcacgcagaagggagaaacgaggtattccattaagctttttcctattggcggatcctgtgctatgctgggagaggatacaggtgaagaagaacttcccggaacctttaatgctgctccggtgtgggggaggatttctgttgtagcggcaggtccgatatttaactttgttctggcttttcttttatcagtgatcattaccggatttgtagggtatgatccggcagagatcatggaagtggaaaaaggttctcctgcggcagaagccgggcttcgggaaggagatattgttacagagtttgacggctatacggtggatgtagcccgtgatctgtatgtatattcttatctgaatgaacttcaggaagaaccggttaccatgaaggtactccggggcggcgaagaaaaaacatttacttacactccggacgtgtcggttcgctatcttctgggctttaatcgctccggtacagattccatggaggttctttctctgatcgagggaatgcctctggaggctgcagggcttcaggcaggagatgtgatcacttccattgacggaaccaggattcctgatggaaaagcatacgaaaactatattgcagagcatcccctttctgacaaagaagtcgagattacctatgaccgtgacggactggaatattctgcaaagattactccaaaggagtacagaactccgattcccggattctcctataatatggggtatattaaggcagagggcttccaggttctgaaatatgctgctctggatgtaaaatatatgatccgtaccacgcttctcagcctgaaagagctggtgacaggtggacttggagtaaaggatctcagcggtcctgtaggggttgtggatgccattggaactacctatgaagaaagcaaaagcgcgggaactctgatgctctggatgaatatgctgaatatggcagtacttctttcggcaaaccttggagttatgaatcttctgccgcttcctgcactggatggcggaagacttgtatttctctttatagaggcagtgcgtaaaaagcctgtgaatcgcgaagtggaaggtatggttcactttgcagggctgatgcttttgatggcgctgatggttgttgttatgtataacgatattcttaaaatattctgatcgtataaaagccggagaatccggcttttgtgctactgtgctgacggaggagcagattgaaaaaaagatgtggcaagggtatgcttgtcctgctgatggcagctctggtgtctgtgggaggaattggagcagcctgttttttcagccgacaggcagggaaagaaaaattccaggaagaggaagcagaaaaactgaaggcggagagagaatatctggaagcaggggcaccggaaaaagccggtccctatccggaataccagagtgaatccgggaaaatggaaaagagagaagaactgcaggatacagaaactgaaaaggagaaaaagcaaaaagcagaggaagaccgaaaaaagaaagaagaagagaaaaggaaaagggaggaagcagaggccaggataaagaaagtagaaaaaatgctggcaaagctgtatgatccggattctgattctgttgcaatgaatacgtcaaaaaacagtaaaatttttcagaatgcacagacagaaatgtggaagcttcctctgtcttatgaccggaaacgtcaggaatttcaaaaaatcgtagaccgtatatcagatgaatgggattacataaatgacgatctgcattatgagacagaaacattgaaaatatccgcgcaggaaaaagacaccggctatacaaaatactgggtctgtcatgtggaaaccttcagtccccggcagctgtgttcggctctttgcggaggaacctacggaaatccccgcaaaccggtttcagaggagcttgctgctcataacggagtgatcggggtaaacggaagcggattttcttatggaacgggcatacctgctcctggaaaaaccatgatcaaaaacggaaagatttataatgatgtgtattccaatggaaatattttttgtgtgacccaggatggcggcatgtttactgcggcagccggaatgacggctgagactatgataaaccggggtgtgaaggatacctactgttttggccctaccctcatagaaaacggaaaagcatcagaaatatccggtcagtttacccagacagcccgatatcagagaacggcagtgggaatggtgaatccgggagaatactatcttgtggcagttgacggaaaaggagccggaggctctgagggcatgacttatcaggagcttcagcaggtgtttctggatctgggatgtgagtatgcatatcatcttgacgggggaggctccacaacccttgtgtttaaaggcagggttctgaacatgcttaccgatggaggaaaagaacgtccctgcggtgacattctgtattttattgatgcaggagacggcgcagaaggggaagaaattgtaattcatgaaaacgaggcaatgatacgcccttccagtggaaagagcagtctgaaataagtctgtgtataaacaaagagaaaaacgcataaaatgctgtaaaactgttttttggagaacaaaatggatcagtcatatccctacagaaaatacagcggcctgagaatgcagcaggaaaatacttccagaggagggctgcaggtaaccgttcttacagaagacggaacaaggccggtagaagacgcagtggtaagaatctcctacacaggagagcctgaccggactgtagaggagataaaaacagattcttcaggtcagacaccggttctggaacttaagtcccctcctctggaatacagcatggaaccatcggaagaacagccttatgccgaatatactattcagatagaggcggagggatttgaaagagaagaaattgcaggaacagaagttctgccggatgttcttgctcagcagcctgtcagactgagatttcagtcacggcaaagctttgacaggatcgtgatcggtccccatacgctgtttgcggaatatccgcccaaaaatccggaagcggagatcaaacctgtcaatgaaacgggagagatcgttttaagcaaggttgtgattccggaatatgtaattgtccataacggtccggtaggagatcagtcggcaggaaattattatgtgcgttataaagattatataaaaaatgtggcaagcagtgaaatttatgccacctggccggacgataccatacgggccaatgttctggctattatgtcgtttactttgaacagggtgtatacagaatggtaccggaataaaggctatgattttaccattacctcgtcaaccgtctatgatcataaatggatttacggaagaaatgtgtttgacagcatttccagaatcgtagatgagttgtttgaaaattatctgtcccgtccggatgtgcgtcagccgattcttactcagtactgtgacggacagcgtgtacagtgcagggacagaggctggatgacccagtggggcagcaagacccttggagatcagggctattctcccatagagatccttcggtatttttacggggatgatatgtatattaatgtggcagaagaagtttccggagttccggcttcctggcccggatatgatctggatattggggctaccggggcaaaggttcggcagcttcaggagcagatcaacacaatttcccaatcctatccggcggttccctctgtgaatgcagacggtatttacggacagaggacagcagatgcagtacggcgttttcagggggtatttggtttgcctgagacaggaatcaccgattatcccacctggtataaaatacaggagatctatgtggcggtcagccggatcgcggagctgaactgagataaatattgtgaaaaagcaaaacatttgcgaaaaataaaaaaatataaaaaaggtattgactttgtctgctggttttgatatactacaattcgtcgcgagggagaaacaaaataatcccaaagaaatgcgatatgcggaagtgtcggaactggcagacgagcaagactaaggatcttgtaagcattgcgcttgtgtgggttcaagtcccatcttccgcattcacagtaaaaactgtgaaaaaagttattgacaaatttgttgatgactgatatactaaaatctgtcgcgagggagaaacaaaataatcccgaagaaatgcgatatgcggaagtgtcggaactggcagacgagcaagactaaggatcttgtaagcattgcgcttgtgtgggttcaagtcccatcttccgcattctgatttagaactcttgatatcacagagattgatgtgatgttaagagttttttgcatactgacaagatctttttaataagtctgagagtttatatagtcttgcctgtttaataaacccgtgtcgggaaaaatccatatgcttatttttttgaaaaaagaggaatttgaagctttgtgtagaatataattaataaggggtattttgtcattctgtggaggaattgcctatgaatataagagaaagcatggaaaaaagggaactggagcttttaagtccctatgcttcctgcagtgtccgatccataggacgggaacgggcggaagaagaatgtgatgtgcgcactgtatttcagcgggacagagacaggattcttcacagtaaggcgtttcgcagactgaaggataagactcaggtttttctggcgcctcagggagatcattacagaaaccgtctcactcacacactggaggtttctcagatcgcccgtactattgccaaggctctcagactgaatgaggatctggtggaggccattgcgctgggacatgacctgggacacacgccttttggtcatgctggagaaaaagctcttaatgagatcagtccgggcggttttgctcattataaacagagcgcccgggtagtgcaggttctggaaaaaaacggtgaaggtctcaatctgacctgggaggtcattgacgggatcctgaatcaccgtaccagcgggaatccttctactctggagggacaggtggtaaggttttctgataagatcgcctatcttcatcatgatatggacgatgcgcagagagccggcattattacagaggacgatattcccgtaaccatgagaatgcttctgggctacaccacaagagagaggctgaatacctttgtacatgacattatagaaaacagtatggacagagaccggatccagatgtcagaggagatacaggaagcgcttatggatctcagggagctgatgttccggagcgtttatgatcaccgggaagccaagcgcgaggaaaaaaaggcgatcaatatgctgaaggagctgtatcggtattatatagagcatccggaggcaatgtccagagaataccgggatctgcttctaaaaggagagtccacagacagagcggtctgcgattatctctccggaatgacagatcagtattctatgacaaagttccgggaaatttacatacctcagtcatgggacagctattaaataacagaggaggatgtctatgcgctattcagacgatatcattgaagaagtacgaagcaaaaatgatattgtagacgtagtatcccaatatgtaagacttacaaaaaagggaaattcctattttggtctgtgcccttttcataacgaaaaaactccttccttttccgtaacgcccggcaaacagatgtattactgctttggctgcggagcaggagggaatgtatttaattttattatggagtatgagaattatacttttggagaggccttaaagtatctggcagacagggcgggggtggagcttccgaagatcgaatactccagagaagtcagacagaaggctcaggaaaaagcagagcttctggagatcaataaacaggcggcgcagtatttttattatcagcttcgcacagaaaaaggtcagacgggtcttgattatctgaaaaaccggggactcagcgaggagactatgagaaagttcgggctggggtattcggaccgggccggcggaggcctgtaccgctatctgaaagccaaaggctatccggatgaccggctgagagagtctgggctttttaatgtggacgaacggcacggaatgtatgataaattctggaaccgggtgatctttccgatcatggatgtaaataacagggtcattggctttggcggacgcgttatgggagatgcgaagcctaaatatctcaactctccggaaacaaagatttttgataaaagcaggaatctttacgggctgaacattgcccggaccacaaggaaaaaatatctgatcctctgcgagggctatatggatgtgatctccatgcaccaggctggctttaccaacgcggtggcatctctgggaacagcgcttacatcaggacatgcaagtcttctgaagcgctatactcaggaagtgctgcttttatatgacagtgatgaagcgggaatccgggcggcgctcaggggaattccgatccttcgggaggcaggggtaaattccagagttgtcagtctgaagccctataaggatccggatgaatttatccggaatatgggaccggaggcctttgaacagaggcttgaagaggccagggacagctttctgttccgggttgaggttgcggaaaacgaattttccatgaatgatcctcagggtcagaatcagttttttgagcggtgtgcacagatgcttctggaactgaaggatgagctggaacgaaatctttacatcgacgctgtcgttaaaatatacagaggacgttatgggatcagcagtgaggatttgagaaagcgtgtgaatacgctagctttaaaggggactcctgcagagcaccggactcagccgaaatccggttcgccggaaaaaaagaaaaaggagtcggcgtcagacacttcccagaagcttatgcttacctggcttgtcacttatccgaagatatttgacaaggtagcccagtatctgactccggaggattttgttgttcccctttaccgggaggtggctcagatgctgtttcagcagagagaagagggcgaaataaatcctgcaagacttctgaacagcttcccggacagcgaggaacagagagaggtggcttctttatttaacgccacgattcatctggaaacgcagcaggaacaggatcaggcatttgcggacacgcttctccgaatcaagcaggaaagccttgcggaaaagaacagaaactgggatccgtccgatcttcagggtctgcagaagcttgtaaaagcaaaaaaagaactggaggatcttggcagaaaacgccgggaactgcatatttcttttgaataaggataaaatataaacactatatggagggattaagcacctatggaaatgaatatgggtaaattcagtgagaaactggtagaacttctggagcttgccaaaaagaaaaaaaatgtgctggaatatcaggagatcaatgacttttttaaggatcagaatctggaagtggaccagatggaaaaggtgtttgactttcttgaagcaagtggggtagatgtgctccgcattacaggaaatgacgaggaactgatcctggatgacgacatggacattgacaagctggacgacgaggaagaggtggagcttgacaagatcgatctttctgttccggaaggcgtcagcatagaggatcctgtccgcatgtatctgaaggagatcggtaaggtcagtcttctgactgcagacgaggagatcgagcttgcgcagcgaatggaaaaaggcgatgaaaatgcaaagaaacgtcttgcagaagcaaatcttcgtcttgttgtcagcattgcaaagcgctatgtgggaagaggaatgcttttccttgatcttatccaggaaggaaatctgggtcttatcaaggcggtagaaaagtttgattaccgcaaaggatataaattcagtacctatgctacctggtggatccgccaggctatcacaagagccattgcagaccaggccagaaccattcgtattccggttcatatggtagagaccatcaataagcttatccgtgtttcccgtcagctgcttcaggagcttggacgcgaaccaagtccggaggagatcgcagaagaaatggatatgtctgtggaccgtgtacgcgagatcctgaagatctcccaggagccggtttctctggaaacaccgatcggtgaggaagaggacagccatcttggtgactttatccaggatgataatgtcccggttccggcagacgctgcagcctttactcttttaaaggagcagctgatcgaggtcctcggaaccctgacagaaagagagcagaaggttcttcgtctcagattcggtcttgatgacggacgcgcccgcactctggaagaggtgggaaaagaatttaatgttaccagagagcgtatccgtcagattgaggcaaaggcgctgcgcaagctccgtcatccaagtcgcagccgcaagctgaaggattatctggattaaggagcaggacatgcagttatcattgagactgtctgccattgcagagatggtgacggaaggaaaccggctggtagatgtgggatgcgatcatggatatctgccggtatacctgatatttgaaaaaaagattccccgggcgatcgccgcagatgtggggaaaggacctttgtccagagccagggagcatattcatcagtatggactggataactacatagaaacaagactttctgacggattgaaggaaatcggcaaagaagagggggacactcttgtgattgccggaatgggaggccctctgatggaaaaaatcctgacagagggagaagaaacccgaaagggcttccgggagctgatccttcagccccagtcagacattcctcatgtaaggaaatttctttttgaaaatggataccatattgtaaatgaagaaatggttcttgaagagggaaaattttatccgttgatgaaggctgttcccggaaaagcagacagagagtggacagaagaagagctggaattcggaaagtttcttctggaaaaatgtcatccggttctgagacagtatctggaacgggaactcaggatccgaaaggagatccttgagcgcctgaaggatgctccgggagcttcggcaggacagcgcagacaggaagtagaggaggaaaagcggaagatccttaccgctttaagacgatatgaaggttagagaactgacagactggctggagggagaatatcccggaaacatggcagaagactgggacaatgtaggacttctggtaggagatgacgggcaggaggtacatcatgtgtttcttgctctggatcttacggaggctgtgctggaggaagctgtgaaagcgcaggcggatatgatcattactcatcatccaatgattttccgtggcatgaaaaagatcaataatcacgattttacaggcagaaaggtgctgtcactgatccgccataatatttcgtattttgccatgcacaccaattatgatgtaatgggaatggcagaactcagcgcggattatctgaaactgaaagaacgtcaggttctttctgtgacagcagaaacagagcagaggccgcaggggttcggacgcgtgggaaaacttcctgaaccaatgagccttaaagaatgtgctctttatgtaaaggaggcgctgtccctgaatgacgtaaggctttatggtgagccggaacagatggtagaaacagcagcggtatgtacaggcagcggaaaaagcatgattccggatgcgctgaaaaagggcgcccaggtctatattacaggagacattgaccaccatacaggaattgatgccacagcgcaggggctggcagtgatcgatgccggacattacggaacagaatatatttttatggaagcagtaagcaggaagctttcagcagaatttccggagctgaaggtttcatgcgcccgtatagtaagcccatatactttattataacctaaaattcacagagcctgaaaggctgcggagagcgaaggacaggaggcggaggctttatggaacagaatatgcgaaaggtcgaactcggcgggacagtaaaagagtatccacagggaactgcgtatggagagattgtaaaagacttccgggaactctgggatgctcccgtgatccttgtgacagtcaacgggaagctggaagaactgcacaagaagctgaagaaggactgcaggctggagcttgtgacaacaaaggacagtattggacatgagacctataaaagaagtgtgtgcatgcttcttttaaaagcgatttatgatgttgcgggcaaggatggcgcagacaatgtggtgatccattattcggtaggctccggatattattttaccataaagcaaagtacagcccctgaccaggagtttctggatcgggtaaaggccaggatgcatgagcttgcagaggcaaaccttcccatccaaaagcgttctgtcagtacccatgaagcggtcgagcttttccataaacacgggatgtatgacaaagagcagctttttcgctatcggagagtatccagggtaaacctttacagtattgggaattatgaggattacttttacggatatatggcaagccataccggttatctcagatattttgatctgaagtcttatgacgaaggctttgtactggaacttccggaaaggaacagaccggatgagatcccgccttttgcgcctgaggaaaaaatctttcgggttcagaaagaatctcaggaatgggtggaaaaactggatattgcctgtgtgggagatctgaatgacaggatcacaggcgaggggatccagaatatccttctggttcaggaggctcttcaggaggcaaagatttccgggattgcagaaaggatcgcagaagccgacaataaaaaatttgtcatgatcgccggtccttcttcttcaggaaaaacaacgttttctcacagactgagtattcagctgagagcccatggcatgcggcctcatcccattgccgtggataattattttgtgaacagagagaacacccctctggatgagtttggagaaaagaactacgaatgtctggaagccattgacgtagagcagtttaataaagacatgctggcgcttttaagcggcgagagagtggagcttccggtatacaatttcaaaaccggcatgagggaatacagaggagattttcttaagctggggaaagaagacgtgcttgtgatcgaaggtatccacgggctgaacgacagattaagctatgggcttccgatggaaaacaagtttaaaatctacatcagcgctctgacgcagctgaatattgacgagcataaccggatccctaccacagacggacggctgatccgcaggatcgtcagggacgcccggacaagaggcatctcagcaaaggaaaccattgcccgctggccttctgtgcgcagaggcgaggaggcgaatatttttccgttccaggaacaggcggatgtaatgtttaattcagctctggtatatgagctggcatgtctgaagctttatgcagaacctctcctgtttggaattgatcagaaggagccggaatatgtggaggcaaaacgtctcctgaagttcctggactattttgtagcagttccaagcgaggcggttccccataattccattttaagagaatttgtaggaggaagctgttttgacgtatagaaatctttctttacatcttgagtaaaccgtgttaaaatagcttttgcgcaagcaggccaggtgatcgcggctgtacagacgaaagggtgcagacgaggaaagtccgggcttcacagggcaggatgccggataacgtccggtggaggtgactcccagaccagtgcaacagaaataaaccgccttctctatgaaggtaagggtggaaaggcagtgtaagagactaccgccgttgtggtaacagaacgggcacatgtaaactccatttgaagcaagaccgagaagaaagcgatacggctgcccgtcgtgctttcaggtgggtcgcttgagccgtccggtaacggccggcctagacagatgatcactcaacgacataacccggcttatcggtctgcttgtgcatatattacgataaaataaaaatatggatggaaataaaaagagacagatgtttgatcagaggcctgcagcaggctgatcttcatctgtctcttgttttgccgtctataaatggaattttatttgttgcgttttcctctgtatttttcttcgcagtactggcagcggtaaatctctttttcttcatctgccaggaagaatacatgatccagcccctgctcaatggaagtaatacatctggggtttttgcatttgatcacattggtgatcttttttggaagcttcagctcttttttgtcaacaatcttttcgtccttgatgatattgacagtgatattgtggtcaataaagccaaggatatccagatccagcttttcgataggacattcaactttgatgatatccttaacacccattttgttgctgcgggcgtttttgataatggcaactgtacagtcaagcttgtccagtttcaggtcatgatagatcgtcatggctttgcctgccttgatatggtcaagaacatagccctcgcggagtgctcctacgtttaacatgttacatccacctccagtaatgtgagaatcagggccatacggacataaacgccgtactgtgcctgtttaaaataagcggctctcgggtcgtcatccacctcaacagcgatttcgtttacacggggaagaggatgcaggatatacatatcctcctttgcaagctccatcttttgcctgtccagtatgtagaagtctttcatgcggacatagtcctcttcattgaagaaacgttccttctgaacacgtgtcatgtaaagaatgtcaagtttcggaagggcatcctcaagccgttctacctcttcaaattcaatgttgtgtctggtcagcacatcctcgcggatatagcttggaacacgaagctcttccggagagatcagtacaaattttacattgctgtagcgtacaagagcctcgatcagagaatgtacggtgcgtccgaacttcaggtctccgcacagaccgatggtaaggttgtccagtcttcctttcagagagcggatagtaagaagatcggtaagtgtctgagtaggatgctgatgaccgccgtctccggcattgataacaggaatggaagaagccatggaagctaccagaggagcgccctctttggggtggcgcatggcgcagatatctgcatagcaggatgtgacgcggatggtatctgcaacactttcgccctttgcagcggagctggaatcagccgaggaaaatccaagcacgttgccgcccagattcatcatggcagcttcgaagcttaaacgggtacgggtacttggctcataaaacaaagtagcaagtttttttccgtcgcaggcatgggcatatttttcagggttcttttcaatgtcgttggccagggtaagaagtttatcaagctcttccacagaaaagtccaacgggctcattaaatgtctcatttgttacctccttaactggaatcagattcagaactgttatttctgaaattatcactttcaatgatataatagaaaaagtgttttttcaagatgattttgaaagtattttctcaaaaaggaggccggtaacaaaccataccggcgcatagtccaggcgtatgactcctctgtagtgaaaaggggtgtggctataatcccaggggcagatcccaaggtgcttcagaaagcttccggcaaagaattcagtaacaaaaataccaaccgtataaaggcagccccggacagcggcgggaatggatgcaagtctgtgataaagaggggcgatcactgcagcgcagccgtaaataggaaacatcagaagagaggtctgccccatcatggtgggctgaccgttcagaagagagtgaaggcctgtccagaacacttccagacaccagcccaaagagccgcagagcagaaaatttcgtttcatatacagcaatcctttcctgtttttttacataaatttaacttccttatagcatgccccggtcttgaaaaaacaatacgcagatgctacacttactgtaaaagttccggaaacagaagcgggacattgctgttcgccagggatactgccctgtggacggcagcagttttatcagggaggaatacagatgacagatttgcaggaatgcagaagacagatagatgagatagacagtgagatcctcagactttttgaaaaaagaatgaaggtcagtgaagatgtggcaaactataaaatccgtaccggaaaaccggtatttgacgcagtaagggaaagagaaaaactgaaatcactgggagagcaggcccatggagagtttaatgctttgggaatccaggaagtttttcagcagatcatggccatcagccgcaaacgtcagtatcagcttctcacttcaaacggaaaagaagagaacagagattacgaaatggtagacaccctgcctcttagaaatgttacggttgttttccagggagtggagggcgcatacagctatgcagccatgagagcgtattttccggaggagattaaaagctatcatgcggaaaccttccgcaacgcaatggaagaggttgtgtcaggaagggcggattatgcagttcttcctattgagaactccactcagggcattgtgacagatatttatgatcttcttacagaataccagcttcatattgtaggagagcaggtgatacgggtggatcatgttcttcttgggattccgggaagctccctggaggatatcagaacagtatattctcatcctcaggctcttgcccagtgcagacgttttctggaagagaatcccggatggaaaacagtaaaaacggaaaacacagcagcctcggcaaaaaaagtcagtgaaaaacgggatccgtcctgcgcagccattgcaagcagagaagcagggcagctgttcgggcttgaactccttgcagaaaatatctgccataatgagcagaacgtcacaagatttatcattgtcagcaacagagcagtctatgagaaaaaatcccagaaggtcagtgtctgctttgagcttccccatgagagacggactctttataatatgctttcccatattatatataacggactgaatatgtcaaagatcgagtccagacctattccgggaaaaacctgggaatatcgtttctttgtggatttccaggggaatctggaggatccggcagtaaaaaacgctatccggggacttgaggcggaagccaatcgggtaagagttctgggaaattacggattacaggaggaagcctgaatgtcagaaatacaggaatgtgttctgtacagagatatggaacacggtgagattttactggaaatggcaaaactgatggatgcgctgtctgatgacaggaaagatccggacagtctgaagcctgtatttttccggtgtgtaggagaactggtggagatggcgggagcttacggcttttcgggaaatctctggcatgattatctgacgcttcttttggtaaatcacgaaaatgcattcagtacagcctgtgagatcaggggagctgtggggggaagcattcaggagcttgcccttcatgattttgagatattcaggaacctgtatgcctttgaccttaccgcttttgacagactgtttcatacatcgtgctgcaggatcatctgcagctatcaggcggcagagaacaccgggaaaatgtttaacaggcgcgtcagagaccggatctgtgatatgagcagaaccctggcgcagacagaaaacagtacagaatttatggaggatatggtccggttctataaggatttcggagttggcaagctgggacttcacaaagccttccggatcgagcatgacgaaaaaggaaatgtggtgatcgcccccataaaaagaattgcccatgtagcgctggatgatctggtaggctatgaaattcccaaacagaagctgatcgagaatacagaggcttttgtaagaggaagaaaagcaaataactgtctcctgttcggggatgcgggaaccggaaagtcttccagcataaaaggcattctgaaccggtattatgacgaggggttaagaatcatcgaggtttacaagcatcagtttaaggatctgaatcaggtaatctctcaggtcaaggacagaaactacaaatttatcatttatatggacgatctttcgtttgaggaatttgagattgaatataaatatctgaaggcagtgatcgaaggcggactggagcggaagccggataacattctgatctatgcaacaagcaaccggcggcatctggtacgggaacgctccggagacaagctggagttaaatgatgaggatgatcttcattcttccgataccgttcaggagaagctgtctcttgtatatcgttttggggttcgcatttattttggagctccggggagaagggaattccagaatattgtaaaagtgctggcagagagaaatggaattaaaataccggaggaaaagctgcttcttgaggcagggcagtgggagctttcccacggaggactgacaggccgcacagcccagcagtttattgaccatcttttgggaaaggagagtgaatcatgacagtaacaacctttgcagcaattgatatcggatcctatgaggtctgtatgaagatttttgagctttccagaaaaaacggatttcgcgagctgaaccatgtaagatatcgtctggaaatcggaaaaggcgcatattcttccgggcgtctggaacagggaatggtggacgctatctgcgaaaggctgaaagatttccgaaatatgatgctggagtttggcgtaacggaatatcgcgcctgttccacaagcgcttttcgtgaaatggtaaatcctgtgatcattctggaacagatctatcagagaaccggaatccgggtggagatattaagcaatgcggagcagcattttctggggtacaaatccattgcggccattgaatcaggctttaaaaagatcatacaaaagggaaccgcaatccttgacgtaggaggcggcggtcttcaggtttctctttttgacaaagatacgcttgtgactactcagagccttaaaatgggaagtatgcgtatcagggaacgtctgaaagagctggaaaaagccaatactcattatgaccagctgatccgggagtttatccggaacgatctgacggcctttcagcggctttatctgaaggacagagacatcaaaaatgtgattctgatgggagattttcttacggatacgattttccgggaagaaatttatgaccatattatcacaatgtcagaatttactgcgcgttatgaggatactgtttataagacggatcagatgcttgcagcagaaatggatattgatccggaatatgcttcccttgttgtgcctaccatggttatctgcaaaagctttctggatgtatttcaggcagaggctgtttgggttcccggtgtgtcgcttctggacggtattgcgtatgatttctgcgaaaagaaaaaatatataaaaagtgcccataattttgaaaatgacattctggtcgcttccagaaatattgctaaaagatattccagcagtaaaaatcatattcaggggacaacgaagctggctctgactatttttgacagcatgaaaaaagtccacggaatgggagcaagagaacggcttcttcttcagatcgctgtccagcttcatgactgcggaaaatacataagtatggcagatgtggcagaatgctcttaccgcattatcatggcaacagagatcataggtctttccacagaggaacgtcaggtgatcgcaagcgcagtccggtataatacaacggaatttgtgtattacgaaaactttgatgacggagcgggaatggacagaaaccgttatcttctggttgcaaaactcacggccattctccggcttgccaacgccatggacagaagccattatcagaaggttgaggggcttcgggcagtgctgaaggaccgggaacttcatctgattattgattccagccgcgatatttctctggagctgggacttttaaaagacaaggtggaattttttgaagaagtatttggcattcatctgatccttagaagaaagagaagagtataaaaggagcgggaaatctgatacagaatccagggaggatattgcagaatggatacaaaaaaatttgtaaaaccggaatattatgtgaacagagaattaagctggctgaaatttaacgaaagggtgctcagcgaggcaagggataagtctcttccgctttttgaaaggctgaaatttctgagcatcacttcttcaaaccttgacgaattttttatggtccgggtggcatccttaaaggatcaggttcatgcagggtatgaaaaaacagatattgcaggtctgaccccgaaagagcagcttcgggagatcagtgagcagactcatgagctggtacgtgtccagtacagtacctttacacgttcggtcatgcctgcgcttgaaaaggcaggacttcatctgatccttgcccatgaggagctgacagaaaagcagaaagaatttgcagaccgttattttgaggacaatgtgtatccggtgcttactccgatggcaatggattcatccaggccgtttcctctgatccggaacaaaacgctgaacatcggcgcgctgatctccaagaaggacaaaaagaaagggaaagaggttctggaatttgctacagttcaggttccttctgtactgccaagagtgatcgagatcccttccggtaaacagggtgtcagaactgtgatccttctggaagagattattgagagaaatatcggcaagctgttcctcagcaatgatgtgatatgcgcccatccttaccggatcatgagaaacgcggatctttctattgatgaggacgaggcggaggatctgctggtggaaatccagaaacagctgaagaaacgtcagtggggcgaggttatccgtctggaagcagaagaaaaaatggataagcgtcttcttaagatcctgaaaacagagtttgacatcagaaacgaggatattttcagcatagctggaccgctggatcttactgtgcttatgaaggtctatgggctggaaggctttgaaaaatataaatccggcaagtatgtacctgcaccggttcctcagttccagaccgacaaaaatatttttgaagtgatccgtgaaggcgatgttttcctgcatcatccttacatgagctttgatccggtggtgaactttgtacggcaggctgcaaaagatccgggagtccttgccatcaagcagacgctttatcgcgtcagcggaaattctcctatcattgcggcgctggctcaggcggcggaaaacggcaagcaggtcactgttctggtggagctgaaggcacggtttgatgaggaaaataatattgtatgggcaaaaatgctggaaaaggccggctgtcacgtaatctacggcctggtaggactgaaaactcacagtaaaatcacccttgtagtaagaagagaggagacaggaatccgccgttatgttcatcttgcgactggaaactacaacgattctactgcgaagctttatacagactgtggcatttttacctgcgacgagcgctacggagaggatgctacggcggtatttaacatgctgtcaggttattctgagcctaaacgctggaatcgactgattgttgctccgatctggatgaaaacacgattcctggaaatgattgaacgggaggcggaaaatgccagaaaaggaattcccggccatattatggcaaaaatgaattctctctgcgatcctgtgatcatgcaggccctttattatgcatcctcctgcggagttaaggtggaactggtgatccgtggaatctgctgcctgaagaccggtattccgggagtcagcgaaaatatccatgtgcgttctattgtaggcgatttcctggaacacagccgtatcttttatttttataatggcggaattgaagagttttatatgggaagcgcagactggatgccgagaaatctggaccgtcgtgtagagattgtttttccggtagaggatgaaaagatcaaggcgcagatcatgcatgtgctggaactggaattaaaagacaatgtaaaagcccacatccttcagcctgacggaacctacgaaaaacaggacagaagaggaaaacagcctgtgaattctcagatggaattctgcagggaagctcaggaactgtcaggaaaaaagaaaaaagagcagaaagaaaattccagagtgtttattccggctgagcctttagaggattttcaggaggaataaaaagcttaaagtacagttcggggggacgaaagggagacagaaggcaatgagaaatacaaagaaaacttttcttgaaagaaagaatgtaatcatatcgttcagaagatacggaattgacgccatgagcgctatggcgcttggtctgtttgcgtcgcttctgatcggcactatcatcaataccataggacagaatgtggcgccgggaagcatgatttcccagagacttctggagatcggcggctatgccacttccgtcaccggtcctgtaatggctctggctatcggccacgcgcttatggcgccgcctcttgtgctgtattcactggcggcagtaggagcagcctgcaatgctctgggcggctccggaggacccctggctgtgttttttattggaattattgcctgtgaagtgggaaagctggtgtccaaagaaacaaaaattgacattattgtgaccccggcggtgactattatcacaggcggggctcttgcaattgtttttgcgcccatgttcaagtccgtctgtgatgcgctgggagtctttattggctgggctacaaatcttcagccgcttctgatgggcatagtggtttctgctgtggtaggggcagttctgacactccctatcagctcagcggcaatctgcgccgccatcggcctgggcggcggagcagttctttccggacttgccgacggtactgtgacaatggaaatctggaacggactttctcttgcaggcggagcggcaaccgcaggatgctgtgctcatatgctgggatatgcggtgttaagctttccggataacggaatcggcggatttgtggcgcaggggcttggaacttccatgcttcaggtgccgaatctgatgaaaaagcctgtgctgtggattccgcctaccattaccgcggctgttacaggcgctctttctacctgcgtgttccggatgaggaataacgggcctgcaatatcttccggtatgggaacctccggacttgtgggacctattggaatcataacaggatggtcacaactgccaaagggatatgaagcaggcgctttccagtgggctggaatgattttgatctgctttgtgcttccgatcgtgatcacctgggcgacagggaaagtgttccgggcaaaaggaatcattaaaccgggagatctgaagattgacatgggctgattgagtgagaaaggcacatgggagaagaagagctgttgtcagggaaaatgtttaagtgattggtataatgcagaagaattgttatgttttttgcggccacaatggttgctgtgggacagcgtaataagaggtaaagtggatacaggaaagaataaaagtcttttagagttatatctaaaatctgacaggatttacggaggagagcagaaatgcagtatgaaaaaagtgtattgttaaagaataataaggaatgttgcattagaaatgccgttggtgatgatgcgcaggaggttttagatatttttctcctgactcatgagcagacagattttttggcgtcctacagggatgaggcaacttttgatacagcgtttgaaaggcagtttttggcggacagagagcgcgcagacagagatgtttatctctgcgctgtcgtagacggacatattgtcggaacagcgggcgtaggcagtatgggatcaaacaagataagacaccgtgcagaattaggggttgcggttgataaagatttttgcggcattggaatcggccgcgcgttgatcgcagcctgcatagattgtgcaaaaaaagcaggctattctcaattggaattggaggttgtaagcgaaaacagccatgcaattgctttgtataaaagtatgggattcgtggaattcggtcgcaatccaaggggcttttgctcacgttaccagggctggcaggaattaatttcaatgagactggaactggactgaaaaattagaatttagaaacaaggtgtttttatggaatatatcagagtaaccaatgagaatatagacaaagagcatatatgctgtgcgatttcaaataacaatgatattcaagtatcatcaaaaaaggattggctaaatgagcgatttgatgaggggttagtttttctaaagagtaaagaacgaggaaaatgttttattgaatatattcctgctgaaaacgcttggaatcctattgttgcagacagctatatgtatattaactgtctttgggtagctggttcttttaagggacatggatattcaactgacttattaaatgcgtgtattgaagacagtaaaattaaagggaagaaagggttatgtatcctatcttccaaaaagaaaaaaccatttttagctgaccctaaatttttaaaacacaaaggttttaccgtttgtgatgaggctgataatggtattcaattatggtgtttattctttggtgaaaagacttctttacctaaattcaaagaaggtgctaaacaccctcatattgatgaaattggatatgttttgtattataccaatcaatgtccgtttaatgcgaaatatgttcctgtcgtagaagaaatcgcaaaagaaaagggtatacagtttaaagctattcatttgcaaagtaaagagcaagcacaaaatgcacctacaccaattacaacttatgctctgttttataacggggaatatttaacaaatgaacaaatgaatgataagagatttttaaagttgctggaaaaataaattccagtttgtaacgcgggtttgaggagtgggaagctttaataattagcatattataaaaagtaagagagagaatctctgaaataagaagagatcaagggatatctctggctctggtgtttgaacatattaatgagtgcagatataaaaaagacagataccttatgactgccgcaaaattccaccggtttaaaccagatggaaaaggcaggatgttgtaagatctgtcttttttatttcttatgtgacttttgagtattgattttgaactttagacatctttctttacaaaatatcgtataaaaatgctgtgtttacagcaggaggattactgcaaagaccaatattgcggctatgattcccaagagtatccagtttacggctttttgggtttttgttgtctgccttccgggatcagaagccctggtttcaacaggagagaaattttccagaagcttttgggccttttccttatgggcggcagagaccatgattttgtcgccggaaacagagtcgccggtataaagctcctgaactcctccctgaatagctgcataaataccgttttctttcagaaaagaaagcatttgctccgcctcaatacggctttttactgtggtaatacagatcagtttttcttccataaagctcactcctcatctaaatatttttgttcctgttgtctgtgtttcctctctgtcatgaaattcataagtctcagtgtgaagaagcagagaaccgtgatccctgtaaaaaagagaaggacagcagtactgatttctgcctctggtccggcttttcttcggatagcaaatacatagaatactgtaaacagggcggaaaagactgtgctttcaaaaaggctgcgcaggggagacggagatttttcccggctgagtcctttttttacggagtcggaaaggtatacaattccgcctgcggctattactgctgtttcaccgatcacattttccaggcggcctgtgacaataagctgcaggatgatcgcaagtgcgcagactccatacatgacataaaaactgatagatgcaatttttgcagcttcctgcatttgacgctcgtctaatttctgtttcatgattcacctcctgaaatgcggaaaggaaaatttttgtgatcaggctgtttcctttcggtatccggtaacagctgatactggcttcatgcttcatacagcctcccagaacagatcgttaagggtttttcccagctcccggcagatggctgtgcataacttcagagaaggattgtaatccccggcctccatcattccgatggtctgtctggtaactccgactttttctgccagttcgatctgagagagtcctttttccattcgtgcgaacttcagtttcagatttttcatctgttcctcctgtgttgtttgttgcctttagtataatcctgtattcatgaaatgtcaattatattttacatatcataattatatatgacttatgaataatatatgttgcttttaaatatttttttaaaattttttcaaaaaaagcttgcattttatcgaaacctgatatatactaagcaagtcggttgacgcaggagcgttaaacacagcagagataaggccagttggtcaaggggttaagacgccgccctctcacggcggaaacacgggttcgattcccgtactggctgctcttaataaaaaccgataaaacaacagaataaggccagttggtcaaggggttaagacgccgccctctcacggcggaaacacgggttcgattcccgtactggctgttaaagtgcaatcaagcgatttgattgcactttttgttttgtgtaaaaacatgcggataactaaccattattagaaaaacagttgcaaaaaatacaggaatgggttatgatacagaacgaatgtttgaaagagagaagaaaggaattaagacagtcatggcaaagaaggaaacgtatgatgcaggcagtatttctgttctggaaggactggaggcagtgcggaaacgtcccggtatgtatataggaagtgtttcaagaaagggattgaaccaccttatttatgagatcgtagacaatgcggtggacgagcatcttgcaggctactgtaccaacatccatgtggttctggaaaaggatggttcctgtacagttgctgacaacggaagaggaatccctgtggatatgcatgaaaagggcgtttctgcagagcgtctggtatttactactcttcatgcaggcggcaagttcgataattctgcctataagacaagcggcggccttcacggtgtaggttcttcggtagtcaatgccctgtctacatatcttgatattaagatcagcagagacggatatgtgcaccatgaccgttatgaaagaggaattcctgctatagaactggaagacggacttttgccaaagcttggacggacaagggagaccggaacctgcgtgaattttctgccggatccggagatttttgaaaaaacaagattttctgccactgaggtaaaaagccgccttcatgagactgcatatctgaatcctgagctgactattctctttgaggacagaagaggggatgagaccgaggctgaggagtaccatgaaccggaaggaattgtgggatatcttcgtgacctgaaccataaatcggaagtgttacatgaaccggttcttctgaaaggagaggcggacggtattcaggtggaagcagctttccagtacaccaatgaatttcgagaaaatgttctgggcttttgcaacaatatttacaatgcagagggcggaactcatctgacaggctttaaaacaacctttaccactgtgatgaatacctatgcccgcgagattggcgtgttaaaggacaaggatgcaaactttaccggagcggatatccgaaatggaatgactgcagtggtgtccatcaaacatccggctccaagattcgaggggcagacaaaaactaagctggataatcaggatgcggcaaaggctactggcaaggttctgggagaacagctggttttgttttttgaccgtaatctagaaactctcaaggcggttctttcctgtgcggaaaaggctgcaaagatccgtaaaactgaggagcgggcaaagaccaatcttcttacaaagcagaaatattcctttgattccaatggaaagcttgccaactgtgagaaaaaggatccatctcagtgcgagatttttattgtggagggagattctgcaggtggatctgcaaagacagcccgcaaccggaattatcaggccattcttcccatcagaggaaaaatcctgaatgtagaaaaagccaccattgataaagtacttgcaaacgcggagataaaaaccatgatcaatgcctttggctgcggattttctgagggctacggaaatgactttgatatcagtaaattacgctatgacaagattgtgatcatggcagatgcggatgtggacggcgcacatatctccacgctgcttctgactcttttttatcgctttatgccggagcttatttatgagggacatgtatacattgccatgccgcctctttacaaggctatgccgaaaaaaggcccggaggagtacctttatgatgataaagccctggaaaaataccgtaaaactcacaaaccgggaagttttacccttcagaggtacaaaggtcttggagagatggatgcggatcagctctgggaaacaaccctgaatcctgagacaagaagaatgaagcgggtggagatcgaggatgcccgccttgcctccagtattacggaaatccttatgggaagcgatgttccgccccgcaaggcttttatttatgaacatgcggctgacgcggagctggatgtgtaaaatatcggaacagtttcagaagcagataccaagacttatttcgggaatatggaaacagaaccgggaacagatacgaatatctgttttagagatatagaaatagcatcagaaacagaagcagagattcgtttcaggaatatagaaacaatgtcaggaacagatacagagctttgtttcagtaatatgggatcagcgtcaggagcagaatcagagattcgctttaaaatacagaaacagaatcgagaacaaaaacagttttttcattttaaggatataaaaacagaatcgggaatgaatgcaggaagtctctcccgacagaaacagcagtatcagaactgcgccaatggaacgattgaaaggaataacagatggaaacaaaacaggaaaatattgtccggacagattattcggagattatgcagaaatcatatattgactatgccatgagcgtcattatttcccgtgctcttcctgatgtgagagacgggctgaagccggtgcagagaagaacgctgtatgacatgtatgagctgggaatccgctacgacaggccttatcgaaaatgcgcccgtatcgtaggcgataccatgggtaaataccaccctcacggcgacagttctatttatgaggcgcttgttgtgatggcccaggagtttaaaaaaggaaagactcttgtggacggccatggaaattttggttctatagagggagacggcgctgcggccatgcgatatacagaagcccggctggagaagctgacccaggaggtgtttctggaggatctggacaaaaatgtagtggattttgtaccgaactttgatgagacagaaaaggaaccttctgttcttccggtcaaaattccaaatcttcttgtaaatggcgcggaaggaattgcagtaggtatggcaaccagtattccgcctcataacctgggagaggtgatcgatgcagtcaaggcatatatgaaagacaatcagatcagtgtcagaggtctgatgcgttatattaaaggaccggattttcctacaggaggaattgtggtcaacaaggacgatctgtgcaaaatttatgagacaggaaccggaaagctgaggatcaggggcagggtcacaacggagaagctgaaaggcggcaaaaaacagcttgtgatcacagagattccctataccatgcttggggcaaacatcggcaagtttctcaatgacgtggcttctcttgtggaaacaaaaaagaccacggacattgtggatatttccaaccagtcatcaaaagagggaatccgaatcgtcctggagctgaaaaaagacacagacgtagaaaatcttaccaatatgctttataaaaaaaccagactggaggatacctttggcgtcaatatgctggcagttgcagacggaagaccggaaactctcagtctgaagcaggtgatcgagcatcatgtggattttctttttgaggtaactacaagaaagtataaaacccttctgggccgggagctggaaaaacaggaggttcaggaaggtctgatcaaagcctgtgatgtgatcgacctgatcattgagatcctccgcggcagcaaaaaccgggagcaggtaaagaaatgtcttgtggaggggaatacggagggaatccgctttaagacaaagacaagtgaaaaagcagcgaagaaacttcagtttacagaaaagcaggccacagccattctggacatgcgcctttataagctgatcggtctggagattgaggctcttcaggcagagtatgagcagaccatgaaaaatattgctctttataaggatattctggatcattatgattctatggcagaagtgatcataaaagagctggatgccattaaaaaggaatacagtacaaagagacgtacctccattgaaaacgcagaggaagctgtttacgaggagaaaaaaatggaggaaacagaggtctgcttcctgatggaccgttttggctatatgaagctgatcgacaaaaacgcctatgaaagaaacaaagaagctgcctgcagtgaaaaccgctatgtgtttacctgtatgaatacagataaaatctgtctttttactgacagcggcaagcttcataccattaaagctgcggacattcctcttgtaagattccgggacaaaggaacgcctgcagacaatctgagtaattatgacagtgcagcagagcagattctttatgtggctcctgtcagccagattaaaaatgatgcgcttctttttgtaaccagaacttccatgtgcaagctggtggaaggcaaagagtttgatgttgccaagcgcaccattgcatccacaaagcttgcgccggaggatcaggtgatctttgtgggcagcgccggggaaatggagcaggtggtcctccagagcgcgggaggaagcttcctgagattcttaaagcaggaggtttccactatgaaaaagacttctatcggagtcagaggaatgaggctggcagagggagatcatctggagcatgcctaccttctggggggacatcaggagtatacgatcaccttccgtgacaggccttatgtattgaacaaagtgcgccttgcaaagcgtgatacaaaaggagtcagaccgagagtctgaaattaatccttgcttttccttatggaaggtgctatgataattgtaacatgataacggatagcataagagtggacttcggtccactctttttgcgaaagtgattacccaccgggaaataacagtgtgtgatccggcatccgtatgtgcgaaaggcaggtggaaaacatgagcagaagagaagaatacgaacagaaggcagaagcccttcttgctcccattgtggaggaagcaggattcgagcttgtggatgtggagtatgtgaaggaagcaggaaactggtacctgagaggctacattgacaagccgggcggcattacggtaaatgactgtgaggcagtcagccggaagttcagcgacagacttgatgagaatgattttattgaggacagctatatcatggagattagttctcccggtcttgacagacctctgaaaaaagaaaaggattttgtcagaagcatgggaaaggctgtagaactccgtacctaccgtcccatagaaaaacaaaaggaattcagcggaattctgactgcatatgatgataacagtgtgacgattgaggaggacggtgctttacgcacatttgataaaaaggaaattgccctgatccgtttgaaaatcgaattttaacagtgtagaaaaacaggaggaaagaagaaaaatgaacagagagttaatggaagcactggatatcctggaaaaagaaaaaaatatcagtaaggatactctgcttggggctattgagcagtcactgatccaggcttgcaagaaccattttggcaaggcagacaacgtgcatgtgaccattgatccggaaacatgtgatttcagcgtttatgcggagcgtattgtaactgattttgtagaggacccggcattggaaatctctcttattgatgcacagaagatcaatgcaaatgccgaggagggagacacagtaagagtgcagatccagtccaaggaattcggacgtatcgcaacacagaatgcaaaaaatgtgatccttcagaagatccgtgaggaagagcgcaaggttctttacgatcagtattacggacaggaaaaagaagttgtcacaggtattgtacagcgtatcatgggcagaaatgtcagtgtgaacctgggcaaggcagacggtatgttaagcgagaacgagcaggttaagggagaagagttccatcctactgagagaatcaaggtttatatccttgaggttaaggatactcccaagggaccgcgtattcttgtttccagaacacatccgggacttgtaaagcgtctgtttgaatcagaggtggcagaagtaagagacggaactgtagagatcaagagtattgccagagaagccggctcccgtacaaagatcgccgtatggagcaacgatccggacgtagatccggtaggagcctgcgtaggtatgaacggagccagagtcaacgccattgttgaggagcttcgaggcgaaaagatcgatatcatcaactgggacgagaacccggcgatcctgatcgagaacgccttaagtcctgcaaaggttattgcagttatggcagatccggatgaaaaaacagctcttgtagttgttccggattatcagctttctcttgccatcggcaaggaaggtcagaatgcccgtctagcagcccgtcttaccggatttaagattgatatcaagagtgagactcaggcaagagaatccggcgaactgtatgactatgacgacgagtatgaggatgacgaatactacggagaagaggaaaatggtcaggagacagtttctgagcaggaagctgaggtaacagaagaagcttctgaagaggcggaaaatacagaagccgatgaacaggcagagatttccgcagaatccggtgaagaagagtatgaaggcgaaaactaaaatccccatgcgccagtgtaccgggtgcagggaaatgaaaaacaaaaaagaaatgatgcgggttttgaagacaccggaaaatgagattcttctggacactaccggaagaaaaaacggaaggggcgcttacctgtgcatttccatggaatgcctgaataaggcagtaaagaatcacgggatcgaacgttcactgaaaacagagattccgcaggaggtctatgaagacctgaaaaaggagtttgaaaagcttgaaaaacagcagtaaagttttatcattggtaggacttgccacaagggcgggaaaaaccgtcagtggagaattttccacagaaaagtccgtcaaaacaggaaaaagctttcttgttctggtggccgaagacgcgtcagaaaatacacggaagaaattccgggacatgtgcgatttttacgaagtaccggtttatgtttttggagataaagaggaactgggaaaatactgcggaagggaattccgcgccagccttgcggttcaggatgaaaattttgcgaaagcaatcatgaaggaacttgagaaatcacagacctgaaggaggaaatcgcatggcaaaaatcagagtgcatgagctggctgccagaatcggcagacagaacagagaagtcatagaagctttaaaagaaaaaggtgtggaagtcaaaagccatatgagcagtcttgacgaagcatctgttgcatatattaaccagaaatttttacacaggggaaaggagcagattaccaaggtggataattccagaacagaagaaaagatggtaacagcgaagccggaagcagaaaaagcggaggctcccaaaaagaaaaaaaatattattcgcgtgtatcacgcacagaatgccagcgacggaggcaaaaacagaccgaaacgtcaggcacaggataagaaaccgggcgcaagaggcccgcaggcggcaaaagcgccgagaaatacagaggcagcgccaaagaaacctgctgaagcagtaaaacgtcagccggaggctccggcagcaaaaccggcggagcagacaaaggcgccggaaacaaagagccaggaaacagcagcgcagaatcagggaaagaacagaccttcccaggagcaggcaggagcaggaagaaaccagaaccgtcagccaagagagcgcagagaaggaagccgtgacaacaatcgtgacggacgtgacagaagccgtgatttccgcggtggagacagaagaccttctgacaacagaggccagggacgtcctcagggcggcggtcagggaagacctgcaagaaataacgacggaagaccggtaagaaacggagagggcggaaatcgtccggtaagaggcggtcagggcggaagaccttctgacaacagaggtcagggacgtcctcagggcggcggtcagggaagacctgatggaaacaaccgtttcggaggtggaaaccgttccggtcagcgtccgggaggaagaagaaacgacggtgatgcagtatttactccggagctgacaaagacttccaaggacagtaagagagagcgcgacagagagaacaaaaacaaaaagaaagattttgataaatcccagggcggcggacacagaccgaatcagggtggaagaagaaacatgtccagacttccgaaagctcttcagaagccggctccgcagccgaagcaggaagagaagaagccggagatcaaggagattactcttccggagaaaatgaccatccgcgagcttgcagaggctatgaaaatgcagccgtctgtaattgtgaaaaagctctttatggaaggaaccatggtaacagtaaaccatgagatcgactttgaaaaggcacaggaaattgctctgggctatgacattatcgcagagcctgaagaaaaggtagacgtgatcggagagcttctgaaagaagaggaagaggatgaggctgatatggtttccagacctccggtagtctgcgttatgggtcacgttgaccatggtaaaacttctcttcttgacgctatccgtaacacaaatgtaacaagaggagaggccggcggaatcacacagcacattggtgcttacgtggtagaaaacagcggtcagaagatcactttcctggatacaccgggacatgaggcgtttacagcaatgcgtatgcgtggcgccaatgcaacagatatcgcagttcttgttgtagcggcagacgacggtgtaatgcctcagacagtagaggccatcagccatgcaaaagcggcaggcgtagagatcattgttgccattaacaaaatcgacaagccaagcgctaacgtagaaagagtaaaacaggagctttccgagtatgagctgattcctgaggactggggcggaagcaccatctttgttccggtttccgcacacacaggagagggtattgatactcttctggaaatgatccttctttctgcggaagtatgcgagctgaaagcaaaccccaaccgtgcggcaagaggtcttgtgatcgaggctcagcttgacaagggcaagggcccggttgcaacaattctggtacagaagggaacccttcatgtaggcgactttattgcggcaggcgcatgcagcggtaaggtacgtgcaatgatggatgataagggacgcagagtaaaagaggcaggtccttccactccggttgagatcctgggtctgggagacgttccaaatgcaggagagatcctgatgtccttcccaagtgacaaggaggccaaaaactttgcaggagcctttgtatctgagaacaagaaccgtcttcttgaagaaacaaaaggcaagctttctctggataatctctttgatcagattcaggcaagcgatctcaaagagcttccgcttattgtcaaggctgacgtacagggatctgtggaggctgtgaaacagagtcttaccaagctgtccaacgaagaggttgttgtccgtgtgatccacggaggcgtcggcgcagtaaacgaatctgacgtttctcttgcagctacttccaatgccatcatcatcggatttaacgtacgtccggatgctatggcaaaacagcttgcagatcaggaaggcgtagatcttcgtctgtacagagtcatctaccaggcgatcgaagatgtggaagctgccatgaagggtatgctggatccggtattcgaggaaaaggtgatcggccatgcggaggttcgtcagctgttcaaggcttccggagtgggaactattgcgggaagctatgtgcttgacggtattttccagagaaactgcaaggttcgtatcacaagagaaggcgagcagatctttgagggcgagcttgcatctctgaagagatttaaagatgatgtaaaagaagtaaaggcaggctacgagtgtggtcttgtatttgacggctttaatgatattaaagaagaagaccgcgtagaggcctatatcatggtagaggtaccaagataggagtgagcataaatgagaaaaaacagcattaagaatacaaggatcaacggagaagttctgaaagaattaagctccattatccggggtgagatcaaagacccccgtattcatcccatgacatctgtcatggctgtagaagtggctcctgatttaaaaacatgtaaggcatatatcagtgttctgggaaatgacgaggcaaaaaaagccacgatcacaggtctgaaaagcgcagagggctatatcagacgccagcttgcaaagaacctgaatctcagaaacacgccggaaatccgttttatcctggacgaatccattgagtatggagtaaacatgtcgaaaatgatcgatgaagtgaccagaaaagatgcttcttctgagaagcctgaggaagaataagagggatggatatgaagaatatttcagaggtactgactggtgtaaaaacaatgggaatcgccggacacatcagaccggacggggactgtgtaggctcctgtatggcgctatatctttatgtgacagagcatttcccggaaattgatgtcaggatatatctggatcatcccaagcctgtcttttctcatattgacagaatcggcgatatccgtacagagacagacggagacagagagtttgatctctttgtaacctgcgacgtaagcgcgcgggaccgtctggctgtggcggacgaatattttgacagggcaaaaaagacggtgtgcattgatcatcatgtcagcaatccgggatttgcggacatcaatcatgtaagaggggatgtcagctcctgctgcgaggtcctttacggacttctggatgcagacaaagtagaccgtccggttgcggctgccatttatacaggcatgatccacgataccggagtattccagtattcttccacctctccggaaaccatgagaattgccggagaactgatgaaaacaggatttgagtttaaccggatcattgatcagtcattttatgagaaaacctatattcagaatcaggttatgggaagggtgctggcagaaagcatcctgcttatgaacggcgcgtgcattatcggttatctgcgcaaaaaagacatggagttttatggtgtggacggcaaggatctggacggcattgtcagtcagctgcgtcttactaaaggcgtggaagttgccatgttcctttatgagacagaaactcagacctttaaggtttccttaagatccaacggtcatgtggatgtcagcagaattgcagtttattttggaggaggcggccacacaagagctgccggctgcgatcttcagggctccatgtatgatgtgatcaacaatgtgacaagagagatcgaacgtcagatctgtatggagaaagtcagatgatggatggagttttgaacgtcaggaaagaaaagggatttacttcccacgatgtggtggcaaagctccgcggaatcctgcacatgaagaaaatcggtcacacaggaactctggatccggaagcagagggggttcttcctgttgttcttggaaaagccacccgacttgtggatatgctgacagaaaaagaaaaaacttatgaggcgcttctgcatctgggaattgaaacagatacccaggatatgacgggaacggtattaaaagagcttcctgtcacagttacggaagaggatgtaaaaaaagaactagaaagctttctgggagaacagcagcagatcccgcccatgtattctgcactgaaagtggacggaaaaaaactgtatgaactggccagagaagggaaaactgtagaacgtaagccaagaaccgtatactttcgggaaatcagcatactggaaatgaagcttcctcttgtaaggatttctgttacctgcagtaagggtacttatatccgtacgctttgtcacgatatcgggcagaagctgggctgcggagggtgtatggaagaactgctccgcacaagatccggtcagtttgctctggcagacagcctgactcttgatcagatccagacgcttacggatcagggagaaatagaaaagcatctgatcgggattgaggaaatcctgggagagcatcctgtcctttttggccggaaaatggcagacaggcttctgaaaaacggaaatcctgtaacagaggcgctgacagaaggcagctacagagacggatgggtgcggatgtatacaagcgaaggtgagtttatcggaatttaccagtggcatcaggcaagtgaaaactaccgtccggtcaagatgtttttataatacaggcatcaggagtaagacatggaatacatgagaatcgaagatcagtttcccagactgaacaactgtgcagtaactctggggaagtttgacggcatccaccggggacacaggaaactgatggacaaaattctggagcggaaaaaagaaaccggagtccaggcagttgtgctggcctttgtttctgacagaaaaacagttcttacaaattcagagcgcagagattttctggaacacatgggagcagatatcctgctggaatgtccgctgaccagtgacatcaggcatatgaaggcggatacgtttgtccgtcaggtgctggcaggctctctgaaagcatcctacgtggcgatcggagaagattttcgctttggctttgagcgaaaggggactccggaatttctgaaaaaatccggtgtgaaatacggatttgaggtggaaatccttccaaaggagatggatggttccaggaagatcagcagtacctacatcagagaggaacttgcaaaaggaaatatggaaaaagtatcttccctgctgggatttgattattttgtttccgggatcgtagagcatggaagaggaatgggacgccgggaattttttcctactgcaaacctgatccccttgccggaaaagcttctgcctccaaatggtgtctatattactctgtccagcttcggacaggagatttatccgggcattaccaatgtgggatataaaccaacggtaggggaaaactttatcggagtggaatcctatctttttgactgtgaaaaaaacctttatggaaaaaactgtactgtagaattcaggaaatttctcagaaaagaacagcggttttcttcctatgaagctctgaaagagcagatacagaaggatatccggatgggcgaggaatattttcgcagggactgatcggttctgaacagctaccggtattttctgtaagaggaggaatattgataaaaggagaatatacaagggagaacagagaatggcagggattattctaggtttgatgggcggccttggcatgtttttgtacggcatgaagcttatgagtgacgcgctggaaaaagcggcaggggccaaaatgagaagtattctggagtttttcaccaaaactcctttgaggggtattctcgtcggaacattttttacggcggtaatccagtcctcaagcgcgtctactgttatggtagtcagctttgtaaactccggtctgatgaatctttatcaggcggcgggagtgatcatgggtgccaatattggcactacagtaacttcgcagctgatttctttgaatctgtctgcgcttgcgccggcaatcgttatggtcggtgtggttatggtaatgttctgcaaaaaaacaaagatacagagagcgggagaggttcttctgggcttcggtattttgtttatgggactttcaggaatgtccgattccatgtcagttcttcgtgaatcgccacaggtagtggagatcatgagctctctgaccagtcatttcctggcagttatggtaggacttgttgtaacaactgtgcttcagagctcttctgctacagtaggtattgttcttctgctggcacagcagggacttctggatatccgcatctgctactttattattttcggatgcaacattggttcctgtgtatctgcgctgcttgcagcgatcaatggaaagaagattgcaaaacgtgcagcactgattcatcttttcttcaacattatcggtaccggaatcatgtatgtggtattcagctttgcgctggaaccgatcacaggctttatcagcatgatctctcacggcaatattgcaagagaggtggcaaatgcccatactctgatcaagctggtggaagtacttcttctgtttccgtttatcaaacagatcgtcaaacttacaggattctttgtacgggatgaagaaaaggtatcaccccaggaattccagcttcagtacattggagcaaaatccgtattttcacctgcaactgcagtgtttgaggcaaccagagaaatggaacgcatgggaaaaatcgctattgagaacctgagacattccatggacgctttatttaccatgaatgacagggaaatccaggaggtctatgagacagaagatcagatcaacttcctgaaccatgcgattacagattatcttgtaaaggtaaaccagactaccattcctactgaagataaaaagagcatcggcggtctgttccatgtagtcaatgatattgaacgaatcggcgatcatgcggaaaacgtggcagacgctgccagaaaacgcatggaagatcaggtggaattcagtccccaggcaaagcgggaactcagtgaaatgctggatgcggtcgtcaccatcacaacctatgctctggatatgttctctcataataatcaggaacatatgcaggagattcttgatctggaaaacaaggtggaccgtatggaaagagagcttcaggaatctcatattcagcgtcttacaagaaatgaatgtacggcagaagcaggcatgatgttctcagatcttctttccggactggagcgtgtggcagaccatgcaaccaacattgctttctctcttacagaggaagacagtacagattctgtaaaaaaataaataatcatttacagccaatatcttttgtgctatactggtttaggtgtgaatcagcccgtatccagagacaggaatctccaaccatttcttaatacgaggcggtcagaaaaagatgtcctgaggacaatctgaaaaataatattttaaggaggaaatcacaatgatttcaaaagagaaaaaacaggcaattatgaaagaatatgcaagatgcgagggtgacacaggttcaccggaggtacaggttgcagttcttacagcaagaattcaggagcttacagagcatttacagacacatcacaaagatcatcattccagaagaggtcttctgaagatggttggtcagagaagaggtctgctggcatacctgaaaaaaacagacatcgaaagataccgtgcactgattgaaaaattaggtttaagaaaataattagtttgcggaagggcggatttccatccgccctgttttactacaaaaaagaaggggaattatgctgttcttctgaaatcagggagtaatttccgagactactgaaaagcccgtgtggagagtcaggcggttttttcagttgtttcggactcctgttcgacagggcagcaaacagcccgtacaatattaaaaaaggagaaaaactatgtacaaaagttattctatggaactggccggaagaacacttacagtagatgtaggacgtgttgcgaaacaggccaacggcgcagctcttatgcactatggagatactacagttctctcaacagcaaccgcttccaaggagccgagagagggaattgactttttcccgttaagtgttgagtatgaggaaaaaatgtatgcagtaggaaagattccgggaggctttaataaaagagaaggaaaggcaagcgagcatgcgatccttacttcccgtgttattgaccgtcctatgcgtcctctgtttccaaaggattacagaaatgacgtaacacttgtaaatatggtaatgtctgttgacccggaatgcaatccggagattccggcaatgctcggttctgctattgcaacctgcatttccgacattccttttgacggtccctgcgctactactcaggtaggccttattgacggcgaatttgtgatcaacccgtctctggctcagaaggagatttctgatcttcagcttactgttgcctctacaagagaaaaagtcatcatgatcgaagccggagcaaacgaggttccggaagacaagatgatcgaggcaatttacaaggctcatgaggtaaaccaggagatcatccgttttattgataagatcgttgcagactgcggcaaagaaaaacatctgtacgcttcctgcgcagtaccggaagagctgtttgcggcaatccgcgagatcgttccgccggaagaaatggaagaggctgtattcacagacgacaagcagacaagagaagaaaatatccgcgagatcacagccagacttcaggaaaaatttgcagataacgaagaatggctgaacgtactgggtgaggctgtttatcagtatcagaaaaagactgtccgcaagatgatcctcaaagatcacaaacgtccggacggacgtaagatcacagagatccgtcctcttgcagcagaagtggatctgatcccgagagttcacggttctgcaatgtttacccgcggacagactcagatctgtacagtgacaactctggctcctctttccgaggctcagagactggacggactggatgaatttgaaacttccaagagatatatgcaccactataacttcccgtcctactcagtcggtgagacaaaaccgtcaagaggaccgggacgccgtgagatcggtcatggagcactggctgagagagcactcgttccggtacttccgtcagcagaggagttcccttatgcgatccgtaccgtatctgagacttttgaatcaaacggctctacctctcaggcaagtatctgtgcatccaccatgtctctgatggcagccggagtgccgatccgcaaaccggtagcgggaatttcctgtggtctggtaacaggcgcaacagatgacgactatattgttcttacggatattcagggacttgaggactttttcggcgacatggacttcaaggtagccggaactcatgagggtatcactgccatccagatggatattaaaatccacggacttaccagaccgatcgtagaggaagctatccgcagaacaaaagaggcaagagaatacattcttacagaggttatggaaaaatgtattgcagagcctcgtaacaatgtaaataaatacgctccgaagatcatccagatccagatcgaccctcagaagatcggtgatgtggttggtcagagaggaaaaaccatcaatgctattatcgagcgtacaggtgtacagatcgatatcagcgatgaaggcgcagtatctatctgcggagtagatcagagaggaatggacgaggctgctcatatgatcgaaatgatcacaactgattttgaggcaggacagctcttcacaggaaaagttgtcagcatcaaagagtttggcgcattcgttgagtttgcaccgggcaaagagggtatggtccatatttccaagatcgcaaaagaaagaatcgacaaggtagaagatgttctgagcattggtgatgaagtaaaagtcatctgtcttggaaaagataaaatgggcagaatcagcttcagtatgaaagatgtgccggaagaggcataaaaaagaggttttatgagatatcataatataacaaaggacgatatgcttaatggagacggactccgtgtggtactctgggtagcaggctgtaatcactgctgcaaagaatgtcagaatcccattacctgggatccaaacggaggtcttgccttcacagaagcagaggaaaatgaaatttttgcagagctggacaaggattatatcagcgggatcactttttcaggaggagatcccctgcatccggcaaacattgcgggcgtaacagaatttgcaaaaaaaatccgtcagaaatatccgaaaaagaccatatggctttatacaggatctctctgggaagaaattcagaatgaagagataattcagtaccttgatgtgtgtgtggacggagaatttcttgtgaagcgtaaggatccttctcttcgctggaaaggttcggacaatcagcgtgtgatcgatgttcctgcaacgctccgtcagggagagatcgtccttcacgcataagcattaaggagaaaagcatgaaaagaattgcaaaatttcataaagtaagtgaaaaacgtttccttgaggattggaaagatacttttccggatgcagaggaagaagaaatcaaaaagatttatgcagatatcctgcttcctgaaagagccactgcaggaagtgcaggctatgatttcttttcacctgcagacttcagccttgcacctggcgggatcatcaagattcccacaggaatccgggtggagatggagcaggactgggttctgaaatgttatcccagaagcggacttgggttcaggtatcgtctgcagctgaacaatacagtgggcattatcgacagcgattatttttattctgacaatgaaggccacatttttgcaaagctgacaaatgacggacgtgaaggaaaaaacgtagaacttgcaaaaggaaacggatttatgcagggaatttttgtagaatacgggattaccgtagatgacgatgcccagggtattcgaaacggcggatttggaagcacgacaaataaataatcaatacattacaaaaacaggagagcctggaaattaatccagaagctctcctgtttcttctttatgagcattttcaagtcctgtttcttctgctttgcgggcattctcaaggattgtgttaaatgcgtctgcagcctttgcatattcatcgtcgctttcgatattttccagcatgggatttccgtcctctgtgcgggagaatacataaagatatacttctccgtcactgttctgaccgttttcgtcaagagggagaagggcaatgtattctttttcatctacaggatagatggtaagaatcgcacattctacttctgtattgtcatccagtgtaagagtaatggtatttggtgtttcattctgatcagagccgcagcctgagcaggaagcgcagtcgcttgcgctgcaggaacttgtaaattcttcgttcatgtggtttcctcactttttgtatttatccggggtcatctgaccagggattatgaatcattttatcagataagcgtcagcttgtaaacagctgaaaaaacgccgtgtctgctttaggggctacgggatacagaaaaacaatatacgatcttctgatccggagatttatatgaagctgtcagaatatcgtgagaagccggttgctgcgaacagtaacagaagccctgacaggaaaagcgggattccgtaaaaacaggtttggtatcaaaggttaaatatggtatactgtaagtatcaaagactgagaaacgttacaggaggaaaaaattgaagcttatttcgtggaatgtaaatgggatcagagcctgcatcacaaaaggttttgaggagagctttcagaagctggatgcagatatcttttgtatccaggagacaaaatgtcaggaaaatcaggtgaaactggaacttccaggctattatcagtactggaatttcgccaatcggaaaggatattccggaaccgcagtatttaccaggcaggaaccgatgaatgttgtaaatggaatcgggatagaggaacacgataaagagggacgcgtgatcaccctggaatttgagaaattttatctggtgacagtgtacacccccaattctcagagcgagctgaaaagactttcttatcggatggaatgggaaagagattttctggcatatcttctgaaattacaggagaagaaaccggtagtctgctgcggtgatctgaacgtggcgcatcaggacattgacctgaaaaatccaaaaagcaaccgcaaaaatccgggatttaccgatgaagaaagagaatgttttaccagagtcctgcaaagcggctttattgatacgttccgatatttttatccggatcaggaaaacatttattcctggtggtcttaccggtttaaggcaagggaaaagaacgcaggatggagaattgattattttattgcctctccccagctggaaagccggcttgaggacgcaaaaatacacacagatattctgggctccgaccattgtccggtagaactggatcttaaaatctgaggttttctgtacaggaaatggaataaacgggactgaaacaggctgtcgaaaaggagagacgatcatggaaaaatgggacaggatagtgattcgaaatggaaatcccgtaatgctcggagcaaacaaaaatgaagaaggaatgaactttgcggcagaggttctgccaggggcagaggcggcgctggttctgtaccagaaaggcagcgcagttccatgcagagagattccttttacagaacgcatgggaaaggtatgtaccatgctggtttccgggctgaacacaaaaaaatatgaatataatttccgcattgacggaaaaatcgtgcaggatccgtttgctcatggaatctgcggaagggaacagttcggaattcggggaaacggagaaaatgaaaaccagatccgctgtacctttcttacagaaaaggaatatgactgggaggaagaccggtttccggagattccataccgggatctgattctgtataaggtacatgtaagaggatatacaaagcagcagaagctacctcagaaacggagaggaaccttcagcggactgaaagaaatgatcccttactggaaggaactgggcattaacgctgtggaattaatgccggcctatgaatttatggaactgccgtattccaatgggaaacaaagccatatgatcacagaaaagagaagccaggacaggataaactactggggctatgtaaagggcttttattttgcgccaaagcgctcctactgtgccacaaaggaaccggaaaatgaattccgggatctggtcaaagctctgcatcaggcagggatggaatgcattatggagctgtattttcccgggggaactaaccctcttacagcccttcgtgcggcctggttctggagagattattaccatgtggacggctttcattttatgggagacggcgtgccaacagagcttcttgcaggagatcatattctttacgggacaaaaaagctttttggggatttatctgtcagcgctgaggatgaaatgtctgcagagtgtacagatgcctttcagagggacatgcgccgttatctgaaaagcgacgaaggaatgcttccggctgtggagtatcatctgcgtcatatccggaatgcaggtggaacggtccactatatggcaagtcaggacggttttaccctttatgatacagttgcctataattatcgtcacaatgaagaaaacggagaaaacaatcaggacggcagcgagtataattattcctggaactgcgggctggaaggccctaccagaaagatggctgtaaaaaaaatgcgggatcagcagatcaaaaatgcatttcttatgctcctgctcagccagggaactcctgtgatctacggaggggacgaattctgcaattctcagaacggaaacaataatgcctggtgtcaggacaatcctgttggatggacagactggaaagccttccgaaagaacaaaaatatttttgaatttgtaaaggaagcggttgcctttcggaaagctcatcccattcttcacatggagaaggagccaaaaggagctgattatcttgcaaaaggttttccggatatttctttccatggagagcgcgcctggtatctgaatcaggaaaataccagccgccttctcggagtgatgtactgcggctcctatgccaaaaaagaagacggttcagaggatgatttcatctatgtaggctataattttcactgggaaaacagaaccattgctcttcccaaccttccggagggtatgacctggaaaaaaacagccgatacctcagacacagaggagggtgactccttccgggaaagagaagagtcctatgaaaaaaatatagagatcagtccccgcaccattgtggtgctgacaggtaaaaaggaggaataagcagtgcatccgtggcttcattttaagaccattaccagacacaagctccttgtgatgaaatactgctttcgtatcgggctctacaaacagggacttcttcacgatctgtccaaatattcgcctgcagaatttctggtaggctgtaaatattatcagggcacaaggagcccaaataatgcagaaagggaggacattggggtttccacctcctggcttcatcataaaggaagaaacaagcatcattttgaacactgggtggactattcactggatggagagcatgtgatcatgggggcgccgatgccccggaagtacgtggcggaaatggtcatggacaggatcagtgcatccaggaactatctgggggatgcctatacagaaagccagcctctggaatattacctgaaaagcaaggacagcctgtggttcatccatccccgaaccaaaaaagaactggaaggacttttaagaatcctgaacgatcatggagaaaagaaacttctgcattatattaagtacgtgtatctgaagcaggagccaaaaagcagaataaagtattaaaaacacaataaaagagaatgaaactgtctgagaagaggggtttcattcttttttttgaaaaaacagaacaaacagtatataacacttgacaacagttttatactgttatatactgtttgcacaggaggagaagatatgcatatcattattaaccatacatccatgactcctatatacgaacagatcgtatcacagatccgggcagatatcatcaatggtgatctggttccggggacagcgcttccgtcagtccgaatgctttcccgcgagctgaagatcagcgctctgactgtaaaaaaagcatacgattatctggaagaagagggactggtgcatactgtccatggaaagggcagttttattgcagaggccaatcaggagatgctcatggaagaaagaagaaaagagctggaacatgatctggataaggctgtccgcaaagcgcgggcaggcggattgacagatcaggaaatctgtgatctgtttcagctgattatggagggagaataaactatgcttgcagaacttgatcaggtaaaaaaacagtataaagattttacccttgattgttccatgaagattcaggaagattgcgttaccggacttatcggagccaacggagcaggaaaaagtacaacctttaaaatgcttctgggacttgtacgaccagattccggagaaatacggatttttggaaaaaacagaaaagatctgtcagaaaatgacagaagagagataggtacggttctttcggacagctttttttccggatacctgacagtggctcagctaatgagttttatgggagacttttatcctggatttcagaaaaaggaatttgagaagcagtgtggccgattccagcttcccgttgacaaaaagataaaggaattttcaacaggaatgaaggcaaagctgaaaatactttttgccataagtgtgaacgcaagatttctgattctggatgagcctacagccggactggatgttatgtccagggaaacgattctggatcttctcagagagtatatggaggttccgggcagaggagttttgataagctcccatatttcctcagatttggagcagttctgtgatgaaatttatatgatcgatcggggaaaaatcgtgatgcaagaagaaacagacaggattctgggcaattacggggtattgaagttagatgacagaagctttgcctctctggataaaaaataccttctcaggattagaaaagaagccttcggctacagctgtcttacagatcagagacagttttatcaggaaaactatccggatcttacagtggaaaggggtactgtagaccaggtactgaccatgatgacgaaaggagaagcattatgaaaggatttttgaaaaaagaccttgccttgctttataatacaggtaaagtatatttggcagtaatagcaatggggattgttttaggacttgtcaataaggagatgagaagtttttcttccagttttattatgatcatgctggcgcttgccggagcttctacactttcctatgatgattttgaaaacggaatgccgtttctgataagtcttcctgtcagcaaaaaaacttatataaaagaaaagtatctgatctgttttttatccggagcggtgggacttgtcattgcggcagttctgggaagtgtgatatttaaaatgcccctgatccacggggaagagccgatgctgtttgtttttcctgtttattttgctattgctgagattatgacagcggtaatgatccctacgagaattaaatttggaccggaaaaatcccgcattgtgggaatgggatttgttgtagcgatttttctggccagtttttgtatcggatatctttttaagctgttttctgtagacatagacgctcttatcagagacgcccaggaaaatatccccaagctggcgcttgtgttgggcgttatggttttttgtatggtgatcatgctgatctcctatacatttagtgtaaaggccctggagaaaaaagaattttaaaatacctggtccgtatgtttcctgtagaaaaggctctggaattttccgggaaaataaggtatcctgtataaaaagtgatttatctgttacaggaggaacggcatttatggaaaaaaatcagatttttataacatgtggaacagagtataaggaaatgacaaaaaggattctggaagaaagcgggctggcagagcagattggaaataaagcttttcgtatcggaatcaagcccaatatggtttccccttctcatccgtctaacggggcaaccacccacgctgaggttctggcaggcattattgaatatcttcaggaaagagggttccgaaatctgacgctgatggagggttcctgggtgggagataaaaccatggatgccttctatgcctgcggatatgacagactctgtgatgagtacggagtagtctttcatgacacacaaaaggacaaaagctatacggcagactgtgggggaatggagcttcatatctgcaccagcgtaaaggacattgattttctcattaatgttcctgtgctgaagggacattgccagaccaaaattacctgcgcccttaaaaatatgaaaggcctgatcccgaattcggaaaaaaggcgttttcattcactggggcttcataaaccgattgctcatctgaatatgggtatccgtcaggattttattgtggtagataatatctgcggggatctggattttgaggacggaggaaatccagttgtaatgaatcgggtgctgacaggccgggatccggtcctgatggacgcctatgtgtgcaatctgatgcattatgagatttcggacgttccctatgtggaactggcaggcagactgggcgtaggatgctctgagcttgaaaaagctgatatccgggcgtgtggagcggatacaggagaacagcttccgaaatcacgtaaggttgtagaactggcagatgctgttgaggaagtagaatcctgcagcgcctgttacggatatctgattccggcgcttgatatgctgaaacaggaaggccttctggaaaagctgcacgaaaaaatccatatcgggcagggattccggggaaaaacaggagaacttggcattggacactgtacaagaaatttccgacatcatctggaaggctgtccccctgtagaaacggaagtatataaatttttgaaggattacatcgaaaatcatcagaattaaaaaagatcaccggctgttctgaaattgcaggtcagccggtgattttctgtatgctctgtacgttgtacatataggaactgaaaattcttttatgcccgtatattacggattatattacaaaaaatccagtatttgatcatttgcgaaataaaatataaaattttaagcaattgaaaatatctgtcgagatatcagaaagagactccatgactcagaaaccggattcagcattctctggcagcctctgtgagaatttccagaatctgatcctgagtaaaacggctgctgtcaatacacagatcgtactggctgaggtctgtccatttggcgtccgtaaaaaattcataataggcccggcgttctttgtctgtacgctttaccatttttcgtgcgctgcgttcttctcttccggtccgtgcctgtacatttctgacccggagatcaaagggtgcatgaataaacacactgagagaacggcctttcaggatctggttggcgcagcgtcctacgatcacgcagctgcccttttctgccagagaaagaatgatatctctctgggcttcatagagaacgtcattcatgggaacggtgtagaagtcaggggtgatctgaacatcatgatctccggaaaagcgccactgatggggctttttttcgtctacttttgcaagctcatgaaaaggaatctgcttctcttttcctgcaagctcgatcagttctttgtcataaaatgcatagccgagcttttctgccagcgcttttccaagtacccggcctccgcttccgtacatgcggttgatggtaataatacgtttactcatatggaatcctcccttctgaatacgctttttatatgtttttatcatatcataattatcaggtaatttctatgaaaactttttaaaaatatgaaaaatataaaaagaaactgcaaatatatcagaaaatacaaaaccacattttttaggtccgggaaacgaaattacacataaaaaagaaagaataagagacttttttactgtcggaaccagtcgatgtaaaatggttgacgaagtcatcagatgtacttataatgagtttagaaaatgtaattttttcttaaaaaataatttttactacatgaaaaaatcatgaaacttcatggaattcatgtgatataattggtgaaatagtataaaaacaaaaaatatagcttgacatatgagctgatattaaatataattttcctatgcattacgaaaatgttacaaaagaaataaaagatgacataataaaaatgcaaggaaagtaaagttatgaggaacaggaaagtatcacaaaatcatgaattacagaaagggaacaaaacaacaggaaatgcatcggtacacgggtttctttcgctgagtgtatgtgctctggcagcggtaggagtcctggcaggcggcatagtgacaggcagtgaccgggagcataaagtttacgctgcttccgaagcagaaagtacatatgatttttctgaaggtacagattatgaacttcctacaggaatagcaggagtagtttccggactcagtgcaactccggcagaaggctctgacatataccggatcggaacctcctgtgaacacgttgtggtaggacagagagttcagagagttggaaagagcgcagagggaattgatctcagtgaatctatggctgctgctgttaatgattttgattccagaatggtatccatgtcatcctctgcaactatgatgtcagatgaggattatcagaatcttctgcagatcgtggaggcagaggcagggaccgaagatatcaaaggtcgtgtactggttgccaatgtgatcatgaaccgggtgaagcatccggagtttccggatactgtaaccgatgtgatctgggagtacgataatggggtacctcagttttcgcctgtggcagacggacgtatcaatgaggttacagttacagaggaaacaaaagaagcggtcagacaggcactggagggtacggattattctcagggagcgctgtttttcatccagaaatcggcagcggaaaaacacaacattgcctggtttgaaaaagatcttgtaaaactgtttaaacacggcgtccatgaattttatacctatccggaggaagcgccggcagataaaaaatcctccgaaaaacagaacacggaaaagtccgaaaaaaataaaaagaacaaaaagaataagaaatcagattccgatctggttcagatggtaaaagcagaataaaaatgaaatacaggccctgcggaaaagctccgcggggttttctgtgtctttttgtgattttactatggtattttgctaaagttcatgatacaatggtgcaaaaataaatcataacagaagaaaggcaggaacgacaatgcaggtattatataaaagtaccagaggtaaaaaagaagaaacagtaacagcctccatggcaattttaaaggggctttcagaggatggaggtctgtttgttcctacgtccattccaaagcttgacgtacctatggaccgtctttcagaaatgacctatcaggaaacagcctatgaggttatgagccgttttcttacagattttacagaagaagagctgaaagactgtattgccagagcttatgattccaaatttgatacagaggagattgctcctgtaaaaaaagcaggaggagtatatttcctggaactgttccatggttctaccattgcgtttaaagatatggcgctttctattcttcctcatctgatgacaactgcagccaggaagaatcatgtaaaaaatgagatcgtaattctcactgcaacctcaggagatacaggaaaggctgcaatggccggatttgcggatgttcccggaacaaggatcattgttttttatcctaaaaacggcgtcagcgccattcaggaaaaacagatggtcacacaaaaaggtaaaaacacctcagtggtgggaatcacaggaaattttgacgatgctcagagcgcggttaagaggatgtttaatgatcaggagctggcagcagagcttgacagaaacggttttcagttttcctctgccaattccattaatatcggccgtcttgtgcctcagatcgtatactatgtttatgcgtatgcaaaactggtaaaagcaggagagatcaatgccggtgaaaaaatcaatattacagttcctaccggaaactttggaaatatccttgctgcttattatgcaaagcagatggggctgccgattcataaactgatctgtgcttccaatgaaaacaaggttctctatgatttcttccggacaggaacctatgacagaaaacgtgagtttatactgaccgcttccccttccatggatattctgatctccagtaacctggaacgtctgatctaccgtcttaccggagaggattcccaggcgtgtgcggagcttatgagatctctgagcgaaggcggagaatatacgatcaccgaagaaatgaaaaagggactggaagatttttacggaaattactgcagcgagggagaaacgagagaagctatcagcgctacatggtacggcagcgattatgtgatcgatcctcatactgcagtggcagcaggggtataccagaaatatctccgggaaacagaggatgccactcctgttgtgatcgcctctacagcaagcccgtataaatttgcaaaaagtgtaattacggctatttctgacagatatgagggactggatgattttgcactctgtgacgcgctgtctgcgctcagtggagtcagacttccggcagcagtggaagagatccgtacagcgccggtgcttcatgatacagttgtggctccggaggacatgcctgcagccgtaagaaaaatcctcggaatctgaggcggagcgaactgaaccgtgacattttatataaattttattattcacattacaaataatatgttgaaaaaatacatataatagggtacaatagtaataacagaaaagagaaatcctggaatgtgcgaggcccctttttattttgaacctacattgacatgaagggactccaacatcgcagatcgtgatgtcagacctctcgttgtggtaggcagatcatctgttgaggacacccacctggcttcggctaggcgtcaaaaggaagggaacggcattccgggactttctgtaaaaagcgagccatatacagggctcttttttatttataaaaatgattccatgatgttctggcagacattgaaggaaaacaaaaatacatggtattgcgggaggaaaagacatggtaacagaaagaagttttggaacactgccgtccggcgaggaagtaaaatgttttcatctggagaatgcctcgggagcttatgcagaggtgctctcatttggagctgtgatcacaaagatctgcgtgcctgactgtcaggggaacttgacggatgtggttctgggatacgatacactggaaagctatatgaaaaacggatgctttttcggcgcatgtatcggacgaagcggaaacagaatagagggcggacgctttaagctggatggtcaggaggtaattcttgctcagaacgaaggaaataacaatcttcacagcggcccggacggttttgaaaaaaaactctggacggcaaagcacatagatcaggaaaataacagtgtgacgttttccaggatcagtccggatggagaaaacggattccccggagaattcgatatcagtgttacatatgaatttacagaaaagaatgctgtgcgtattgtttacaccggtgtgtgcgataagacgacggttgcgaatatgacaaaccattcttactttaatcttgcaggtgaaggcagcggaaatgttctggatcagtatctgaccattcacgctcagacctacaccccggtaagagaagattccattcctctgggagaaaatgttccggtagaaggaacaccgatggatttccggaaagaaaaacagattggaaaagatattgaggcagaatttgaacagctgaaatttacaggcggatttgatcacaattacgtgacagacggatatactcaggcagagatcagagagattgcctgcgcccgctgtgaaaaaacaggaattgtgatggaagttctcagcgactgtccctgcgttcagttttatgcaggaaattttgtagaacaggaggccggcaaaaacggtcatatttatgataagagagacggattctgtctggaaacacaggtagagccaaatgctgtaaatgtagaagagttccattcaccggttctggaaaaaggagaacgttattattctgaaaccgtttatcatttttccgtgagagcttaaacatatttttctggtttttctcatacaatgataatatgaggaaaaccagaattttttttagatatcagattttatttttgcttcttttttcgtggatgatgctgttaaacagggcggcagaatcgcggctgaaagaaaaacaggaatacataaaagcggcagagcagcaaagtcggtctgaaagagagactgtaaaagaaccggcacagaatacagagtatcaggagagctttgaatctgaaatacaaagcacaggagagttctccggagccggggaagaaaaagtaccgagtgcgggaaaaaacaaaggcgccgggaaagtggagacacgggaggaaaaagccggaaacggaggttctgtaacagaggaatcagatactgaggacgggatgaaagaagccggaaacatacgggttcttcttatgacaacagattatcagtcgtattttcatcctcgggtaactgctttgcgtgatggaaaagagattgtctgcaactttgaaaatatggcggcttcagaggaacctgtggtgataccggctcatgaaaatgggattcagcttacatcaatacaaaggcagtgcggaaatcctgtttatcagggaagtctggagatacagaggaccgatcagggatttactgtgatcaatgagctgcctctggaaacgtatctggaagcagtggtgccaagtgaaatgccttccggctatcataaggaagctttgaaagctcaggcggtatgcgccaggacctatgcgtggaaacagatgcaggagggacgactttcaaagtacggagcagacgtagatgacagtgtaaactatcaggtataccagaatatcgctcctcagcaggcaacatcagaggcggtcagggacacagaaggaaaaattctctgtcagaatggaaagcctgttcaggcatattatttttcaacttcttccggcgtcaccagtacagacgagatatggggagcggaggaacccgcgccttatctgaaaagcgttgactgtggttttgattcggaagaaccgtggagccagtgggagacagagatcctttgggaaacgctggaaaggcgcgcacaggaaatccagggagcttcaggaaagcttctcggtgtttctgtttccagaataaatcagagcggcgctgtaaccgggcttcaggtaaatacagaaaacggagattttctggttgagaccgagtatgatatccgtcagtttctgtccccaaagggaagtttgatcacagaaaaggacgggactcaggtgcagggaagcgagcttctcccaagcgcctattttgatatcagcgcaaagccgggaaattctgtggttctcacaggcggcggctatggtcacggggtgggaatgagtcagacaggagcggacagaatggcggaacagggatatacctgtcaggagattcttgagtatttttttaaagatattgaaatattgcagattgggggctagaaacgcctccgctcatgtgcttgtcacaggaatattttcatggtatcataataaaagacgtatctgacttcagacactggacagaaaataaaccgtcgtaagctggataacgggagaagtaattatggaaaagaagaatgataagggagctcttcatctggctctgggctttatggagagaatgagaaaagatcatgtcagcgcatatgcggctcaggcagcgtactttctgatcatgtcttttatcccttttgttttgttcctgaccgcgatcgtgcagtatacacctctgacctaccgggaagtacgtcaggcaattatgagtgttgtaccggaaaatctgcagggatttgttttaaatattgtggcagaggttttttcaaaaagcgcggccgtgctgcctctgtctgctctggtggccctctggtcctcgggaaagggcacgcaggctctgatcaatggcctgaacaccatttaccatgtaaaagaaacacgaaactggctggtaaacagaatctactccatgttctatatgtttctgtttgtacttgccctgatcgccagtcttttgcttctggttatgggaaacaggatccatgttctgatttccggatatgttccgtttctgggaaatatgatcggcaggattctgggggcaaaaacctttctggtctttgtgatgctgttttttgtttttctggtgctgtaccggtatctgccaaacagaagggcatccctgaaaagccaggttccgggagcttttctgacagctgtggcatggtctgtgttttcgtatctgttttctctgtattttacattttttccggatttcagtatcatgtatggaagcctttccactttgatcctggttatggtatggctgtatttctgtatgaaccttcttttgtacggagcagagatcaacgcatactttgaaagtcagttccgccaggcaaagctgtctttctggcagctgatcgcaagaaaacgcagggaatggaagctggagcggaaaaaagaaatagacaggaactaaaaaaataacggaaaaatcttgacaggaaaaattttctgtggcatagtaaacaaagatataaaagcgttgaaggcgttatagggagttgttttctttcagagagaagaagtcaccggctgcaagcttctttaagttcagacagttcctcagtttcccgccggagctgcatttctgaaccccgaaggcagtaggtaatgacgtagctgcgcgttaagcagatactttgagcgcctgtatgtacatgcaggaaacagggtggtaccgcggatattccgtccctcttttgaggggcggtttttttgtatatggagaaattacttccgtaatattctcatatacaaaataaagttccggacagcgggcacagtttacgcatgcctgcatgcaggagactgtgcacattggacgggctgacaggaatgagcagtcaggacaaaagcccggattgcgaattgctgacgattacgggagtgcataagcgcagagtaatcgactttattaatgatactgcagatttatccggcaggtgcaaatatgaaatgaaataagaaaaaaggagaatacaaccatggatatgaaggaaaaacttcaggaactggcagaagcagccagaaaacgtattgaagaagctgaaggtcctgacaaactcaatgaagtaaaggtggcttaccttggtaaaaaaggtgagctgacagctattttaaagagtatgaaggatgttgctccggaagaccgtccgaaagtaggacagctggtaaatgagacaagagcaaaaatcgaggagcttctggaagcttccagaaagaaactggaggaagctgcccgtgaagcaaaaatgaaagcggaggttattgacgtaacccttcctgcgaagaagtcaatgatcggacaccgtcatccaaataccattgccctggaggaagtggaaagaatctttatcggaatgggctatgaggtagtggaaggtcctgaggtagagtatgcagactataactttaccaagctgaatattccggaggaccatccggcaagagatgagcaggatacattctttattaacagctccattctgcttcgttctcagacatctccggtacaggcccgtaccatggagaaaggcaagctgccgatccgtatgatcgctcctggacgagtgttccgttctgatgaggtagacgctacccattctccgtccttccatcagatcgagggccttgtaattgataaaaatattacttttgcagatctgaagggaactcttcaggagtttgcaagagaactgttcggaccggaaacaaaaacaaaattccgtcctcatcatttcccgtttacagagccaagcgcagaggtggacgtatcctgctttaaatgcggcggaaaaggctgccgtttctgtaaaggctccggatggatcgagattctgggctgcggaaccgttcatccaaacgttcttcgtatgtgcggcattgatccggaggagtatacaggctttgctttcggtgtgggtcttgagagaattgcgcttctgaaatatgagatcgacgatatgagactcctttacgaaaacgatatccgcttcctgaaacaattctagtaaagataaatatacggaaggatatttatctttgcggcttcctcgatcctgtatcgaggaatttcattgatcttccgacacaacagaaaggaagcacgagcaaagcgagtatttactttctgtgtcggttaaacgacggaatcaaaaggatcacgaagtgatacgtcggcatgaaatgccggattccggagtaaaaacgttctggaaaagacagagtaaagagatacaaccgaaaggaagcaggagcgaagcgagtatttgcttttacgaattttatctataaacaacaagaaaggtggatataaacatgaatacatcaatgtcctggattaaaatgtatgtgccggatctggatgtgacagctcaggaatatacagatgccatgaccttgtcaggaacaaaggttgagggctttgaaaagctggatgcagatctggaaaaaatcgtaatcggacagattgaaaaaatagaaagacacccggacgcagataagcttattatctgtcaggtgaatgtgggaacagaaacagtacagatcgtaaccggagctccaaatgtaaaagaaggagacaaggttccggtagttctggacggcggccgtgtggcaggaggccatgacggcaaaaaaactccaggcggcgtaaagatcaaaaaaggcaagctccgcggggtagagtcttttggcatgatgtgctctattgaggagctgggaagcacaagagaaatgtatccggaagctccggaatacggaatctatatttttccggaggatgccccggtaggcgaaagcgccgtcaaagagcttggacttgacgatgttgtttttgaatatgagatcacatccaaccgtgtagactgctatggcgttctgggtattgccagagaggcagcagcgacctttaacaaaaaattctgtcctcctgttgtaaaagctacaggaaataatgaggacgtttctgattacattaaggtgacagtagaggatccgtctctttgtccccgctataccgcaagggtagtaaaaaatgtaaaaatcggtccttctccgaaatggatgcagagatgcctggctgccaatggaatccgcccgatcaataacctggttgatattacaaattatgtaatggaagaatacggacagcccatgcacgcatatgatctggatctgatcgaaggaaatgagatcattgtccgcagagcagaaaacggagaaaagtttgtaaccctggacggacaggaacgtatcatggatgaaaacgtcctgatgatctgcgacggcaaaaagccggtaggcattgcgggaatcatgggcggcgaaaactccatgatcacagatcaggtaaaaacagtgctctttgaagcagcatgctttgacggtacaaacatccgtctgtcctccaagagaatcggccttcgtacagacgcatccggcaagtttgaaaaaggacttgatcccaataatgcccaggcagccattgaccgtgcgtgtcagctgatggaagagcttggagcaggtgaggttgtgggcggcatggcagacgtgtgcagtgaaacaagagaaccgtccagagtgccttttgagccggaaaagatcaatgggcttcttggtacagatcttacaaaagaagaaatgctggaataccttggcagagtggaactgactcttgatccggaaacaaatgagatcgtggctcctaccttccgtcaggatattcactgtatggcagatgtggcagaggaagtggcaagattcttcggctatgataagattccaaccactcttcctacaggggaagctaccacaggccgtcttccttttaagctgagaattgagcagattgcaagggacattgcagaatactgcggattctctgaagcaatgagctactcctttgaaagtcctaaggtgtttgacaggctgcgtatctctgaggacagtgaactgagaaaggtaattaccatcagcaaccctcttggggaagactacagcatcatgcgtactacaactctgcatggaatgctttcttctctcggaacaaattataacagaagaaataaagatgtacgtctttatgagctcggaaaggtttatcttccgaaatctctgcctcttacagagcttcctgacgagagagttcattttactcttggtatgtacggagcaggcgatttctttgatatgaaaggtgtctgcgaagagttctttgaaaaggcaggcatgaagaaaaaagtttcttatacaccggacagcaataaaccttacctccatccgggaagacaggcaaatatcatttatgaaggaaagaccgtaggttatcttggagaggttcatccgatcgttgcagataattacaatatcggagaaaaagcctatgttgcagtgatcgatattatggatattctggaatttgccggattttctcataaattcacaggaattgcaaaatatccggcagttacccgtgatttaagtatggttgtaccaaagaatgttctcgcaggccagattgaagcggttctggaccagagaggcggaaagatcctggaatcctatgagctttttgatatttatgagggagcccagatcaaggaaggctataagtctatggcgtattctgttgtattccgcgaccatgataaaactctggaagaggctgagatcacagcagctatgaaaaaaatccttaatggtcttacagaccttggaatcgagctgagaagctgatgaagctttatattctgagacatggaaaaacagaatggaaccgtttaggcaaggttcagggatgtgtggatatccctcttgcagaagaggggatttctcttgccgccaaagtaggcagggcattgaaggaggttccatttgatctctgctttaccagtcctcttacaagaacaagacagactgcagagctcgttctcggggaacgggcaaagcagattccggttattgtggatccgagaatccaggagattaattttggcgttctggagggttccaggtttaaggatgaaaacggaactatcctcagtgaggaaatgaagatcttttttacagatccgaagaattttatccgtccggaaaagggggaaaatatttcagatattctgaaaagaacagaggagttctggaaggagatcacaacagctcctaagctgcaggacaaaacgatcctgatctcttctcatggctgtgccgtacgggcgctgcttcagaacatctaccatgatccggaagatttctggcatggctgcgttccgcctaactgcagcattaatgttgtggaagtaaaagacggacaggaaatccttatagaagaagataaattatatgcataaaagcccgggctgccgtgaatgatttcgcggcagcctgtttttggtcgtggcagaaaacaggagatgatccgttactgtgaaggtcgtgaacagtaatgataatccggagtttgccatagttagctgaatattacagcttgtactggcgcatatgatatgatattatggaaaaaagggtaaattgtgcgtttatttgcccgctgtacaaggcggagcctaagataataaccaatgaggaggcttactatgaagaaaaaaattgtaaatgttgttttgtttcttgcggtactggcagccgcggtagccatgaccctgtatgtggggcagggcgcggtcagcgttatggtttataattttatctttcttggcgttatggtggcaatttatgttgtgggaatgttcggaggcatgttccggatgaaccatcttactcaatcgcttgagaatgcagccgcagagcttggaaatcttttccacaaaccgggaaggatcggaacagatcaggtagaaacactgaatggtatttttcatcatccgtatcttgacggaacaatgaattcctttacagacggtgttctgaaaagtgaagagggcattgatgatattgaagaatatctcaacgaagaggaactggataatcacatacataaacgacttctggaaatggtgccggatatttttacaagccttggtatactgggaacctttgtgggactggtgtggggacttaaaaattttgagccttccaattatgaggctatgacaacttcggtggcctctcttgtagacggcatcaaggttgcctttcttacgtctatttatggtatttctctgtccattgtctatacctatggaatgaagatcgagtactcttccatggcagaggccctgcaggcatttctggcaaagtttcacagtcatgtaatgccttccgcagaaaatgagtcaagaaatcttctgatctccagccagaagatccagacagcagccatgaaccagatggcagaacagttttccgtacagatggcggacagctttgagaaagtgatcactcctacattcaaaaaaatgaatgattctctggatactctggtatcttctgttacccggtgccaggaagatgcgatacgggagatcctgaatgtatttttaaaggaaatgaacgattctttcggagtacagttttcggagtttggaaaaacattgtcccagctgaaagaggctcaggcagacaatgtgaactacactacgaatctttaccaggcaatgagcagacagctcagcgattcctatgcgcagcatgagcagatcatgaaaaagatcatggaggatgcaggcgcttctcagaaagaatatattgagacagcgaaccgtattgttcaggataaccagctgatccagaaacagcagcaggcagattaccagcatcttgcggattatctcaaggaagcagaaacatcatctgccaaattctgggtagcctgcaatcagaccatgcagaagtatgtggaagctgcggctcagggtatggacagagtgtcttctgccggcaaagtaagcggagaggttcttgctgccaataaacgtgtagttgaggcatttgacgcaaaaatgcaggagtttgcagaatatcagaaaagatcctaccgtaccatggaacaggtccggagactgcttgcagatatttctgtggcgaaaaataacggggagatccgtctcagcgcaggaaagaccgctcagacggaatctctggagcagctgaaagaaatcctggaagcgcagggagaacagcagcaggagcttctggaagaaatgtcaggaaatataagggagctgtccagaaacgcacagaaaggaaaattcggcttattcagataaaaggagaaacagatgcgcaaaaaaagaaaatcagaagacgggggatttaatgtctggcgttcttattcagatatgatggcaggcgtattgcttttgtttgtactgatcatgtgcgtgaccctgtttcaggcacagaaaagctataatgaaagtattgaggaacgggatgaaaagattgctctgcaggaggagtatactctggagatccttgcccagcaaaatgaactgaatgagaaggaaggtcaactgaaggatcagaacgaacagctgaaaacacaggacgaaaaactgaaggatcaggaaacgctgctttcggagttggcagccaagctgaaggatcaggaggcgacactgagcacacagaaagcggacctggatgaaaaaacagctcttttaaaggaacagcaggcccagatcgaccagatcatcggagtaaaggctgatgtgatcgaggctctgagacaggaatttgcaaaaaataatatcaacgtggatattgatacacagacaggcgctctgactttggaggcaagcgttttgtttgattatgatgaagcagaactgacagaagaaggaaagcaggcgctggagcaggttcttcccatctattgtaaagttcttcttcaggaagattacaggcagtatcttgcagagatcattattgacggatatacggatacagacggtgattacagctataacctgtatctgtcccagcagcgttctctggcggtagctcagtatcttctggatattcagggcaatttcctgaatgcggatcagagccagcagcttcaggattatcttacagtcaacggtcactctatggcaaatccggttctggatgctgacggaaatgtagacaaggatgcatccagacgagtagaagtaaagtttcgtctgaaagatgatgagatgatcgaagagctgaacaaggtgatgacagaggcgaacacaaaaactgaaaaagcagacaatacacagaaaaaaacagaggaaaaatcacaggaacagccggtttcctaaatcatggaaccatatgtttcaggaacaatacctgcagatacggcataaaataacaataacatggtttatgtactgggcacacagggaatactctgtggagacatatgtaaacatcaggaaaggtatcacacatgaatgtattttttggactgatgattccgtttataggaacgacactgggatctgcctgcgtactgtttatgaaaaaagaactgaacccactggtgcagaaagcatttctgggctttgcatccggggtgatggtggcggcttccgtatggtcccttctgatcccggccatggatatgagcggggcaatgggaaagtttgcttttattccggcggcagcaggactgcttctgggtgtgggatttctgcttgtgatggataaggcggtaccgcatcttcatcttggcagtgaagagtctgaaggtccgaaggtggctttaaaaaaaacaacaatgcttgtccttgcggtaactcttcacaatattccggaagggctgtctgccggagcggtatttgcaggtgtgctgaccggaaatgatacagtgaccatggcaggagcctttgcgttggcaattggcattgccattcagaatttccctgagggtgccattatttccatgcctctcagaggcgcggggatttcccggggaaaagcctttctctggggtgcggcttccggaattgtggaacccattgcaggaggcgttacacttcttctggcatcgcagatccagccccttttaccctatctccttgcttttgcagcaggagctatgatctatgtggttgtggaagaactgatcccggaagcaaatgagggagaacacagcaatgtgggaaccattgcgttcgcggtaggctttgtgctgatgatggtgctggatgtggctttgggataaaggaaagaggttataataaaacagcgatctatgtcctgacagaatttcagaaagctgcagtcagtcgaatgtgttaaatgaacatgtatacagtatgcgataactgagaaaatataaataaaaaaagcttgcaatgccggatgtactatagtataatctaagctgttgtaaaaaagatggtcctctgttacagaatttatgtattaagaacatccagaagaataggagagaaaaacatgaacgacattatcagaaacattgaagctgctcagttaaaagcagaagtgccggagttccgcacaggtgatactgtaagagtacacgcactgatcaaagagggaaaccgtgagagaatccagatcttcgagggaacagtcctgaagagacagggtggaagcacaagagagactttcacagtaagaaagagctccaacggagtaggcgttgagaaaacatggccgcttcattccccacatgtagttaaggtagaagtaatccgttacggtaaagtacgccgtgcaaaactgaactacctgagagatcgcgttggtaaagctgctaaggttaaagagcgcgttagataatgacaatttcagagatttaaaaagcagggacaataacgacagctattgtccctcttttttcaacagttgttgctctgattttgttttgtgcatggagaaatcagatatggacatcgcaaaaattaaaaactggaaagagcatccgaaggttctggagctgaaagcaaagctggaaaacaaaaaagtgcgggattctctgcgctggatctttgagcttgccgttacccttgtatttgctgctctggtggcggtattaatgtttcagaccgttaccatgcaggaaagctccatggagcccactcttgcagtgggggatcgctttttcatgaatcaggcagtatataaattttcttctcctcagagaggagatctgatcgtgttccgtacaaatgccagtgatgatgcagctcttcatatccgtcgtgttataggactgcccggagagactgttcagatccgggacggcgtgatctacatagacggagaagtatatgacgaggcggcagactacccggaaatccagaatccgggactggcagagaatggcgttagcctgaaatccaatgaatattttgtactgggagacaacagaaataacagtgaggacagccggtatgcagatatcggtacagtaaaaaaacgctatattgtgggtaagctctggttcatctgttcgcccatagaaaaagcgggatttttgaaaggctaggtaatatatgaacgtacagtggtatcctggtcatatgaccaaggcaaaaagacagatgcaggaagaccttaaactgatcgacctgatcatagagctggttgacgcaagagttcctctttccagcagaaatccggacattgacagactgggacagaacaagtccaggctgatccttctgaacaaagcggatctggcagatgaaagacagaatgaagcctggaaagaatattttcagggaaaaggctttcatgtggtaaaagtagattcccgaaacggagcaggaatgaaaaatatccagaatgtgattcaggaggcctgcaaagaaaaaatagaaagagacagaaaacgcggaatcaaaaaccgtcctgtccgggctatggtggcaggaatccccaatgtgggaaaatctacatttattaattcatttgcaggcaaggcctgcgccaaaacaggaaaccgtcccggtgttacaaagggaaaacagtggatccgtctgaataagaatgtagagcttcttgatacgccgggaattctatggccgaaatttgaggatcaggaggtagggatccgtctggcctttgtgggctctatcaaagacgatattctgaatatggaagagcttgcactgactttgatcggatatctgaaagaaaaatatccgggcgtattaaatgcccgttatgaggtaagtgaagaagaggagaacctgggtgttctggaaggaattgccagagccagaggctgcctgaaaaaaggggaagagctggattatgccaaggcttcggggattctttttgacgatttccgaagcggaaagcttggccgtattaccctggaatgggcgcctgcggagtaaaaaagatgaaaacgatcacagagataaaaaatgagtttgcctctgcttctttagaggaaaagaaagctctctgtcagctgtatgcagaggatgagagaagcggagtaaggaagctgatagagaagtgccgtaaagaagaagcagctcttgaaaaggagctcttacgtatggagcacatgatggaatatgaacataaatatgagcatctgggatatttatgcggtattgacgaagtgggaaggggacctcttgcaggccctgtggttgcctgcgctgtgatccttccaaaagatcatgggattctttacctgaatgattccaaaaagctgactgcaaaaaagcgggaagagctttatgaggtgattcttgagaaggcagtttcagtgggaattggaatggcaggacctgcccgcattgatgagatcaatattcttcaggcaacctatgaggctatgcgccaggcaatcgaaaagctttctgtacggccgcagcttcttctcaacgatgcagtgaccattccggcagtggaaatcccccaggttcccattgtcaagggagatgccaaaagcgcttccattgccgcggccagcattgtggcaaaggttacaagggacaggcttatggaagagtatgatgcggctttgccggaatacggatttgcttccaataagggatatggttctgcggagcatatagaagccttaaaaaaatacggaccttcccccattcacagagccagctttattactcattttgtatagagaaaacgaaaaggcaaaagctctttcggaaagtaattacataagatacctacacagacaggaaatgagagagaaggatcaataaacgtgagctgggcagtcgttatgaaaaacaggcggctgcttttttaaaacaacagggattgtatataaaagcccggaatttccgctgcagatccggggaaatagacctgatcgccagagacggaagatatctggtttttgtggaagtaaagtaccggcatacttccggcagcggcggagcatcggcagcggtaaattataaaaagcagaaaatgatcagccgggcttctctgttttatcttgtacgctatgggtatccggaggatacgccctgcagatttgatgttgtggctattgacggacagaatatccagtggataaaaaatgcctttgattactgcggataaaaaaggagagattttatgaaaatcctatggcatcaggaaaacatgcctcatatgaatgtcagaaaaaataagggagtgacttatcttacctggccggagtttgaaaaaattccgggttttgtacacgggttcagcaccaggcttggaggagtcagtgaggggatttattcttctatgaatctgagctttacaagaggcgataaggaggaggctgtgcgggaaaactataacaggatttctgctgccctgggcttttcgccggaggacattgtaacctcggatcagacccacactgccaatgtccgtgtgataaccgctgaggacaggggaaacggaatcacaaagccccgtccttacacggatgtagacggaatgataaccaatgtgccgggccttgtactggcaaccttttatgcggactgtgtgcctctttattttgcagatcctgtccataaggcagtgggcctttctcattccggatggagaggtactgcggcaggaatcggggcggttacggtaaaagaacttcagaagcattatgggacccgcccggaggatatttatgcggctatagggccttccatctgtcaggactgctatgaggtcagtgaagatgtgattctggaatttcagaaaacattttccagggaattatggaaggatattttttacagaaaagaaaacgggaaatatcagctgaatctctgggaggcaaaccgtcagattctgcttggggcagggattcttccggaacatatttccatgccgaatctctgtacctgctgcaatccggagttcctttattctcacagggcctctcagggaaaaagaggaaatctgggagcgtttctgggaataaagcggtaagacaggggctcatccggagaagcttattctgcagcgtttttacagatgctaccctgaatgataagtaaaagcacaaaaaaagcacagaagtctgtgctttttttgatgacagaaactattatttactgtccgtttactctggtcatcagatccatgatcttttcgttgctggagcgtaccttttcaacagaaacatcatgattgataatatcgataatacttgcaagatatttgctcatatttgcttcaacatagtacggtttggtaagaagctccggaatacggtagttcaggtttgtggtgataaccttatcgatccagcctttttcgtaatattcatcgaatttagccagtccgtccgtgaacagtccgtatgtagtgcagataaacacgcgctttgcgtgacgctctttgatctgctttgccacatccagcatactctctccggaggagatcatatcgtcgataataacaacgtccttgccttctacagaatcgccaaggaactcgtgtgccacgatcgggttctttccgtttacgatagtagagtaatctcttctcttatagaacatacccatgtctacgccaaggatattggagaaataaaccgctcttgacatagcgccttcgtccgggctgatgatcataagatgatcgttgtccagtttgaagtcaggaacattttttacaagcgccttcaggaactgataggttgggaaaaagttgtcaaatccattcagcgggatggagttctgtacacggggatcatgagcgtcaaaagtaatgaagttggatacgcccatatcgcttaattctttcagtgccagagcgcagtcaagggactctctcttggaacggcggtgctgacgtccttcatacagaaacggcatgatcacattgattctgtgagcctttcctgtagctgcggaaatgattcttttcaggtcctgataatgattgtccggggacatatggttctcgtgaccgcatacagtgtacgtttcgctgtaatttgtaacatccaccataataaaaaggtctgttccgcggacggattctttgatatagccttttccttctccggtgccgaagcgtacacattcacattctacaaggaaggatggttcgcagtatccctgaggaatgatctcagattttttcttggcaaccagctctttacggaattttacaagtttcttgtcaacctcctttgcaagatcctggcagccggaaagggctgcaatacgaatcggcgcaaccggaagggatttttcaagtaactctatattcggcataattttcctcctgagttttgtttatattttgtttataaaaaataaaaccataatacatttatatcatttgccccaaagcccgtcaaggaatttattgtttttcgcctgtaaaaatcatattgtatacaaaaatgtacgcgattcagtcagagcagaagaatgaacagatctgtctgccgtggatccggtaagagcgtattttgccaggcgggttccgggatttggtcagcagaatgcgaaaatgccctgtggaatattgccggtgaagggctgctcctgctgtttctgtgtaggcggctgctctttatacttgacagcgcaggccgggcttagagtataattatcattggcaaaaataaagggaagagatcgaaacctcttcccaatcatacagatttatcttattgtttaattgacgagaaaaaacataaggagtctgtatgatgaattcaatgataaaggaaaacggtgtaacattcaagcagttggagaaaaatatttatgcgtgggtctgccagattggcagggagttcacaaaagagttcctggaacggtatgaccggatgctgctggaggacagagacaaaaagaagtaccggaataaaggaggcagacagacaaccgtaaagaccgtatatggtgaggtgacttatcagagaaatgtttatgaagtgaatgaggaggacggaagaaagcgttttgtatatctgctggacgaaacactggatctggatcacgtgggtttgatctcaacgaatatggcggaactgttggtaaaagggattacagaactatcttacagagaatgtgcccgtcaggtcagtgagatgactggacagaccatcagtgcgatgggcgtatggaacgtcattcaagcgttaggggaaaaagtctgtgaggatgaagctgagctgacagaagaatataagaaagggcatgtaaaaggaaaaagagaagttcccgtcttgtttgaagaagcggatggagtttatatcaggctgcagggaaaagaccggaaagaagaaaaacaggataaatcagagattaagatagggattgcgtatgaaggatggcgaaaaaccggttcggatcgttatgcgctggaaaataaagtagtcgttgccggattttccaaagcaaaggagtttcaggaatatcgggaagcagcaatcgcgcaggagtttaacctagatgaagtgggtcaaagaatcttaaacgcagacggagcatcctggatcaagaaagtgaaagataaaagcacctgttttcagttagacccgttccaccggaataaggctgtaaaagagaaaatccatgaacaggctgcgagggaggctgttttagaactgataaaagccgaagagattgaagaagtattccggtatctggaaatctatcgaaacagcttaagtgatgagtccgagattgaagatgtagaggacctgattcgttattacgagaacaaccgggaaggactcgtgccttaccagtctcaaaatctcaatcttccggagccaccggaagggttggcatatcggaatatgggaacgatggaaaaccatgtatggagcgtgatcgcaaagcgaatgaagcatggacatagaagctggagtaaacggggaggaaatcatctggcgaagatcctggcaaaaaagtgcagtggaaaactgtatgaagtgaccgaacgtctgcgtcgaccggtatttgaagaagaaaaagtagaagaattgtatggagagattctgatgtcagcgaaagcgccaaagaaagacggaaaaggatatgaatatccggtgattggacatatggttagattaaatggaaagatacagggggagagaaaacgactgttgtacatggctggatattaaactgggacaaaacatgctatttcaacaaaaagataaatcaaaaagaaagttgccaacgattacttgacagtaaccaggccggggtgatataaaatttgcagttgttttttatgtgtaaaattgttatgatgattacagcttacagtacggacagcaggcgacagggtgtgtctgtacaggcggaagaaagggattttatgaaaaaaaagaagcatatcatctccagggtcctgccgggaagtattgcccaggaactggagcttgagccgggagatatcctggctgccataaatgacactccggtggaggatgtttttgattatcgttatctgatgaacgatgaatttgtgacacttctcattgaaaaagcagacggcgagctgtgggaactggaagtggaaaaagaatatgaggaagatctggggatcgagtttgaaaacgggcttatggatgagtaccgctcctgcaccaaccgctgtattttctgctttattgatcagatgcctccgggaatgagagaaactctttattttaaggatgacgattccagactttcttttcttcagggaaattatgtgactctgacaaatatgagccagaaggatattgaccggatcattcagtaccgtctggagcctattaatgtttcgtttcagacaatgaatcctgagcttcgctgcaaaatgcttcataaccgctttgcaggagaggctcttttaaaggcagaccagctttatgaggccgggattaccatgaacggtcagatcgttctctgtaagggcgtcaatgatggaaaagaactggaattcagtctggaaaagctttctgcatatgcgcctgtgcttcagagcgtgtccgtggttccggtaggactttcaaagtttcgtcagggcctgtatcctctggagccttttaagaaagaggatgcggtaaaggttctggagcagattcaccgctggcaggaaaaaatgttccgggagcatgggatccattttgtacatgcgtctgatgaatggtatctccttgcggaacaggagcttccggaagaggagcgctatgacggatatcttcagctggaaaacggagtgggaatgctgagacttctggaaacggaggtgcgcagcgcagtggatgcccgtccgggagatgacagagcggcggaaatgaccattgccacaggaaagcttgcgggcccgtatctggaaaagtgtgtaaaaatgatacaggaaaaatatccgaatataaagattcgtgtaaaggtgatcaccaataactttttcggggagctgatcacagtttcaggactgatcacaggaactgatctgaaagagcagcttgcaggtctggatctgggagaaaggcttctgatcccctgtaatatgcttcgaagcggggaggatattttccttgacgatgtttctgtgcgggaactggaagatgcgctgggaacagaaattgtagttgtagatgaaaacggagcagatctggtggcttctgtactggatgctccggatcataataaacagataaggagacagatgtatgagcaaaccagtagtagccatcgtgggcaggcctaatgtgggtaagtccacgctgtttaatgcgcttgccggagagatgatttctattgtaaaagatactccgggcgttacaagagacaggatttatgcagatgtaacatggctggataagtcctttaccatgatcgatacaggcggaattgagccggagagcggagatattattttatctcagatgagagagcaggcccagatcgccattgacactgcggacgtgattgtttttattacagatgtgcagcagggtctggtggattctgatgcgaaagtggcagatatgctccgccgcagcaaaaagcctgtagtgcttgtggtaaataaggtggacagccttcagaaatatatgatggatgtttacgagttctataatctgggaatcggcgagccgattgccatttcagcggcaaaccgtaccggcctgggcgatatgctggacgaggtggtaaaagaatttccggaagacgcagatacagaggaagaggatgacattccgaagatcgctgttgtaggaaagcctaatgtaggaaagtcatctctgatcaatcatcttctgggagaagaccgtgtgatcgtttctgatattgccggaaccaccagagatgcagttgatgccagagtaaaatggcagggtcgggattacatttttattgatacagccggtcttcgccggaagggtaaggtaaaggaggagattgagcgatacagcgtgatacgtacagtaacagctgtggaacgggcccatgtggtggtgatcgttattgacgctacagagggcgttacagaacaggatgcaaaaattgccggaatcgctcatgaaagaggcaagggcgtgatcattgctgtaaataaatgggatgccattgaaaaggatgacaaaaccatttataaacacaccaaccgtatccgcgaggtactggcatatatgccttatgcggagcttgtatttatttccgcaaaaacaggacagaggatcaaccgtctgtttgagaccattgacgcagtaatcgaaaatcagaccctgcgtatccagacaggtgtgctgaacgagattctttcagaggccattgccatgcagcagccgccgtctgacagaggcaagcgtctgaaaatttattatatgactcaggtgggagtaagaccaccgacatttgtgatctttgtcaatgacagagaactgatgcatttctcttataccagatatctggaaaataagatccgtgatgcatttggattcagaggaacttctctgaaatttattatccgtcagcggggagagaaggaataggagcggttatggagcgtttgatttgtctggccatcggatatgtatgcgggctgtttcagacttcttacattatcggaaggcttcataaaacagatatcagagaacacggaagcggaaatgcaggaactaccaatgccctgcgtacctttggaaaaaaggcggggatcctgacacttctgggggactgtctgaagtgtgtggcagcgattgttcttgtgcgtgttttccttggaaagacttatggagatattcttccgcttctgagtctgtatgcggcggcgggctgtattctgggacataattttcctttttacctgaagttccggggaggaaagggaattgctgcttcggtgggttttatccttgcctttgactggaggatcttcctgatatgcgcagtgatcttttttgcgctgttctttacgacccattatgtgtccttatgctctctgagtgcttatctggctgcttttgcggcaatcatcgttctgggtcagggaggggcctatggcatggatgcttctcataccatggaaatgtatgtggttatggggctgcttacagcgctggcttttttccgccacagagcaaatattatgcggctggcaaaaggcacagagaaccgtgtttatcttgggaaaaaagataaaaaataagaaaggtcaaaaaggtggagaaaatggcgaaagtaagtgtgttgggagcagggagctggggaactgctctgtctcttcttctctgtaaaaacggccatgaggtaaccctctggtctgctcttgaggacgaagtgcgtatgctctgcgaaaagagagagcatgaatccaagcttcccggagtgcgccttccggaggatatgaagatcactgcagacctggaagacagtctgcaggatccggacgtagcggtgctggcagtgccgtctccttttaccagaagcacagctcacagaatggcgccttttgtaaaaaaaggacagatcattgtgaacgtggccaaaggtgtggaagaacatactctgatgactttaagcgagatcatcagtgaggagatccctcaggcagacgtctgtgttctgtcaggtccaagccatgcggaggaggtgggaaaaggtcttcctacaacctgtgtggtcagtgcagaaaaaagagaaactgcagaatacctgcaggggatctttatgagccctgttttccgtgtgtataccactccggatattctgggagtagagcttggaggcgcgctgaaaaacgtgatcgcccttgcggcaggaacagcggacggtctgggatatggagataataccaaggccgccctgatcaccagaggcattgcggaaatttcccgtcttggcaccaaaatgggtgccagagcggaaaccttttacggcctttcgggaatcggcgatctgatcgtaacctgcgccagtgttcacagccgtaacagaaaagccggttatcttatgggaaaaggctataccatgcaggaagccatggatgaggtaaaaatggtggtggaaggcgtttattctgcaagagcggcaaaaagtcttgctgagaaatatcaggtggaaatgccgatcattgaagaagtgaacaaagtgctttttgaagacaagcctgccgcagatgcagtgcgtgatctgatgctcagggataaaaaagtagaaacacccatgcttccctggcagtaaaacagtgagcaggaagaaaaacagaattttggctcagagggaagaggaagccgtctgagctgtatatgaaaaaaagaagcgcctgtccgcagctgacatatcagctatgggcaggcgtttctgttaagcctgaatgctcatagttataaggggatccctcttaaatcttccggaacatgagagctgtggtaatcctggttcagagtatccagaagatccatatcctcctggtcaatggaaaaatcaaaaattcttgcattggcagcgatgcgctccggattggttgatttggggattacggaaattcctttctgaacagcccagcgaagtcctacctgagccggtgtgtgcgcatactttgttccgagaacacagagaacatcgtgatccagataggctcctcttgccagaggcgcataggcctgtacctgaatgccgttgtcctggcagtagtcgatcagttctttcggataacacaatggatgacattcaatctgatttacagccggtacaatgccggatatttttttcagctcttccagattgtggatgttaaagttgctgacgccaatggaacgggcgcgcccggagcttaatattttttccatttccttccatgtgctcagataacagccgggtaccggccaatgaaccaggtagagatcaatgtaatccagacccaggcggtcaaggcttctctgaaatgctccgcttatgtcacccagacgctgggcggtattccagacctttgtggtgatgaaaagttcttttctggaaacgccgcatctggcgattcctctgcctacgccttcttcgtttttgtaaacggaagcggtatcaaccaggcgatagccgttctgcacggcgctgatcacggcattttctgcttcgttatcttcggtggctttatatacacccagtcctaaaaggggcattttctgatcgttgtttaaaaatacagcggttgtcaaagcagttcctccttgcctttggcctgtttcagaccgattccaacatatttgtttactcgcatgtatactattataccatataaatgtgaaagaagaacatcaaatttattaaatatttactacgaagaggacagaatatattatgttaataaaaaaacattaatgttataaaaataacaaaaaaaataatgttatagaaaaataacacaaatatacagaagcagaaggaaagatttcctgctattttatatgaatttaatgattatttccttgcgtatccagggggaaagatgtataataactataattgataaattcttgtcataagtctgcacttttttaaaaagtggaggttctgtttcccggaggagacagagaaaggagaagataaaatgcaccttattaaagacgaaaacggcaatctgatccagcacggacatgagcatgtccatgaacacactcatgagcatacccatgcggacggagtgacacattctcacgcccacactcatgagagcggcggagaacatgctcattctcacggagaaggatgtcaggaacatacacatgaacactgcggttcctgccaggaaggcgactgcaaaaaagaaaccattgctcttctgacttatatgctccagcacaatgagcatcacgcacaggaacttgaccagatggcggaaaatctggacaagatggggctggcagcttctgcaaaagccatccgcgatgcagttgctgacttccagaaaagcaacatgcgtctgggacttgccctgacacttgtaaaagaggaactgaaataacagacagaagatcaggaggtggcaccaatgtgtcttgcaactgtatacaaagaaagtgacgattccgttatttttaaaaatgtaagccgtattgatgtggacggagacaaagtgatcctccgggacattatgggagatgagagagttgtggaaggccgcattcttatggtagatctggcaaacagtattgtaaagctctgctgtgaataacatatgcccgtggatctgacagaccggatctgttaaaaaataaaaatacgcggaggtaagaggaaatgacagcagtaaagttatctgacatgatgaaaaaaagacagcttctgtcctttgagctgtttcctcccaaaacagaccggggaatggcaaatctgtcagaaaccattcagcagctgtgcagatataaaccggaatatatttctgttacttacggagccggcggtggaaatgttggagctaaccgtcaggtatgccggatggtcagaaacgccgggactgtaccggtcactcattttacagtgatcagaaacacaaagcagggaatcagggaacagcttgaaacttatctgaaagagggcgtggatcatatccttgcgctgcgcggggattttccgagaggcgaaacctcaacaggcggagattttaactatgccacagatcttgtaaagtttatccgtgatgaattcggggaacagtttgagatcgcggtggcggggtctccggaaggccatatttcctgccgcagtctggaggcagatatcggagtccttaagatgaaacaggacaatggggccgactatattatgactcagctgtgctgggatatggaacagtttgaaagatggctggataagatacggagggcaggagtgaccctgccggtggatgtgggcatcatgccgatcctggatcaggcggcaaccattaacatggccctttcccgtaatggctgtgtgatggaccgtgagctttccaggctgatctccaaatactggattttccccaatcctttcgacaaagcgccttttgacgattcgcttgaacagaaaaaagcagactttaaaaaggcgggaattgaatacacgatcagacagatcgacaaataccgttctcttggcgtagaggggatccacctgtatgccatgaacaaatggaaagacgtatcccagatcattgagaggtccggtatacgcacgcttatttaaaattgacacgatcaggaggctgactgttttatggcacatgtaattgccgtcgccggaaaaggcggcgtaggaaagacaaccttatgcggaatgctgatccagtatctctgcgagcagggaaagggacctgttcttgctgtggatgcggatgccaattccaatttgaatgaagttctcggtgttaaggtagatacaacactgggagatgtccgcgaagagatcgctcaggctgagatggcggcaaagagccctatcccggcaggaatgtccaaagcagactatgcggaggtacgttttgaggacgctcttattgaggacgatgattttgatctgcttgttatgggaagaacccagggaaaaggctgctactgctatgtaaacggtcttcttcaggcacagcttgcaaaatatcagaataattatccatactttgtggtcgataatgaggcggggatggaacacatcagccgaggcgttcttccgagtatgcagactgccattcttgtaagcgactgttccagaagaggaattcaggcagtgggaaggatcgccaggctgatagaggaatgtaatatgcatccttctacagtgggcctgatcgtaaaccgcgctccgaaaggggaactgaacccgggagttctggaggagattgaaaatcagggactgaatcttctgggagtggttcctcagaatgatgcggtttatgaatatgactgcgagggtcgtcccacagcatcccttccggaggataatcctgtgaaacaggctctcagaaaaattgtggataatctgaatttataatatatctgaatattcctgctgcggatgcggcagggataacgtgccggagaacatattccggccgctttttacacacggaaataacccatgggcggggatgggtttcgcctgcggagttattataaaaaacgagaaaaatatacatgaatcattcttgtatcattaaaaggaggtcaacaatgagtgaattcaaattaacgacagtggaagagtttgaagctgccaccaacaggcttctggagaccggagctaaagttggcgcggattcctggcagatgcgtgtgaaaaaccagaccccacactgcaagttcggcgagaaaggtatctgctgccgtatctgttccatgggaccatgccgtatcactgcaaaagcaccgagaggtatctgcggatgcgacgtacacggtatcgtaggaagaaacttcctgaaatttacagcaggcggagcagctactcattccgatcacggacgtgagatctgtcacacactgcactgtacaaaagcagacggaaattataccgtaaaggatcctgagaaactgatccgcattgcaaaagagtggggtgtggaaacagagggcagagatatctatgatctggctcatgagatggctgaggttggtcttatggaatacggaaaaccgtttggttaccagagattcctggacagaatgccggaaggccagaaggaaaaactgatcgagaacgagatcgcgccacgggcaatcgacagagaagtttcttcttctttacatatgactcatatgggatgttcttctcttccggaggctcttgtaaaacagtctctgcgctgcggtcttgctgacggatggggcggttccatgatgggaacagaattctctgacgttctgtttggaactccgaagccgatcgacactgaggcaaaccttggcgttatggttgaagagaatgtaaacattgttgttcacggacatgatccgagtctttctgagatgatttgtgaatatgcagacagcaaggaaatgatcgactatgcaaaatccgtaggagcaaagggaattacagtatccggtgtatgctgtacttcaaacgaggttgcaatgcgccgcggtattccgatggcaggtaacttcctgcagcaggaaaacgttgttctcacaggagcatgtgaggcgatcgttgtagacgttcagtgtattttcccggcactgggaccactgagcaaatgtttccatacaaaattcgtaacaacttctccgatcgctcagatgcctgattctgaatttatcagattcaatgcagaaacagcaggagagaatgcaaaggcaattgttaagatggcgattgataacttcaagaacagaaaaccggagcttgtacacattccgcagctgaaacagaaagctactgtaggttactctgtagaagcaatcgtaaaagttctggacggcgttaccaactctcaggttgacgagcttggaacaacaaaaccgcttcttgagtgcatcacttccggcgttatccgcggtgctgttgccatggttggatgcaacaacccgaagatccgtcctgactatgcgcacattgagcttatgaaaaaatgtattgcaaatgatattatcatcattgcttccggatgttcagcacaggcagctgcaaaagcaggtcttatggacaaggctgcaaaagatctctgcggtgacggtctgaaacgagtatgtgaactggcagatatcccgcctgtattacacatgggctcctgcgtagatatttcacgtatgatgaaccttgcggcagcactggctaaggatgcaggtcttcagatccatcagcttccggtagtaggctgtgctcctgagtggatgtccgaaaaagcagtatccatcggtaactatgttgttggtaccggtattgataccttccttggcgttgatccttatgttgaaggttctgaccagatgggacagcttcttacagagggaacaagacagtggacaggcgctgcttacacagttgagaaagacattgacaaattagttgatctgatgatcgaaagaatcgaagaaaagagaactgctctgggcatctaaggatcccggcagtgaatatttgacaaaggtggatgacataaaatgaaaattgcagttacaggaaaaggcggtgtgggaaaaaccacatttgcggcaacactggcccgtttatatgcggcagagggaagacctgtgcttgcggcggatgtagatccggatgcaaatcttggtcttgcgctgggatttgatgaagaaacacttgattccattgtacccatctccaaaatgcgtaagctggtagaggagagaaccggggcttccgcaaacaatcagttttaccatctgaatcccagggtggacgatattccggaaaaatacggaaaggtctgcaacggggtcaggctgcttgttcttggaactgtggaaacagggggcggcggatgcgtatgtccggagcatgtaatgctgaagcgtattatcaataaccttgtccttcgcagggaggatgtggtgatccttgatatggaagcagggctggagcatctgggaagagggacgaccgaaggcgtagatgcctttgtggttgtgatcgagccgggtgcaagaagtgttcagacatacaaaaacgtgaagcgtcttgcaaaggaccttggtgtggcgcaggtgaaggttgtggcaaacaaggtgagaaatcaggacgacgaagcctttatcatggaaaagattccacaggaagatcttttaggtatgatccactataatacagatgtgatcgatgcggatcgacagggaaaatccccctttgatttcagcgaagaggtcacaggtgagatcagaaaaatcaaagacaggattgatcatcagtgatcataaaataggaggtataacagtgactttatttgaaagtgttttcgcgggaaatgatgcggtttatggcctcactgagaatgccattgaccaggctattgaaacacatggtgcggacaaagctgtcagctttccgaatacagcttattcccttccatgctactatgcagtaacaggaaccaaggttggtactcttgcagagttaaaggaagctcttgcagttgtaaaaactcttatgacaagagaaaaaagaacacatgacgcatttatgtcaggtgttgcaacagctctctgcgcagagttcatcgaggttctgaaatacatcgacggagcaactccttatgaagagccatgctacggacatcttgcagatgcagtgatccgtgagcttggtgtaccgcttgtaacaggcgatatcccgggtgttgcagtaatccttggcaaggcagcttccgcagaagaggcagcagctcttgtaaaatcctatcaggcgcagggtatccttgtaacactggtaggcgatatcattgatcagcttgctgagatcaactacaaaacaggcgcaaatgtacgtgtgatcccgcttggaaaagacgttacatctgtaatccatgttgtatctgttgctcttcgtgcagctctgatcttcggtaacgtaaaaccgggcgatgcagcaactctgatggaatacacaatgaaacgtgttcctgcatttgtaaatgcatttgctcctctgaacgacgtgatcgtagcatgcggcgcaggcgctatcgcacttggattcccagtaatcacaaaccaggctgacgttccgagagttccgaagagcctgatctgccagacagacgtttccaagtggaacgcaacttctctggaagcccgtgacattaagatcaagatcacaaacattgatatcccggttgcatttgcatctgcattcgagggcgagatcatccgtcgtaaagatatgcaggttgagtttgacggctcccgcgtggactgtgcagagcttgttcagacctgtgacgcaagcgaggtagaggatcacaagatcacagtgatcggaccggaagctgacgagatggagcttggaagcaaaaacagcatcgcttatgtggttaaggttgcaggcaaaaacatgcaggcagactttgagccggttatcgagcgtaaattccataactacatcaactgcattgagggtgtataccatacaggccagagagatatgcagcgtatccgtatcagcatcgatgcatttaacgcaggcttcagaatcaaacatcttggtgaggttctttacgcacaggttaaaaatgagtttgacgcagttgttgacaaatgcgaggttgtgatctacacagatccggctgagtgtacaagagtacgtcatgaagttgcaattcccacttttgagaaacgtgatgagcgtcttgacaaccttacagatgagtctgtagacgtttactacagctgtatcctctgccaggcattctctccaagccatgtatgcgtggttacaccggagagacttggcctttgcggtgcggtttcatggctggatgcaaaagctaccaacgagcttgatccggcaggtccgtgtcaggtgattacaaaagaaagaccgatcgacgaaaatcttggcgcatatgaagatgttgatgaagctgtacagaaattctcacagggtgctcttgagcacgtaaccctgtactccatcatgcaggatccgatgacatcctgcggatgcttcgagtgtatctgcggtatcgagccgttctccaacggtgttgttattgcaaaccgtgagtatgcaggcatgacacctcttggaatgaccttcccggagatggcttccatgacaggcggcggtgttcagacaccaggatttatgggacacggaaaacacttcatttcttccaagaagttcatgaaggcagagggcggtatcgagcgtatcgtatggatgccgaaagagctgaaagaatttgttgctgaaagactgaatgcaacagcaaaagagctttacggaattgacaacttcactgatatgatcggtgatgagacagtagcagaagatccggaaacactggttgcattccttacagaaaaaggacatccggcactttctatggatccgatgatgtaatctgttctgtcagaagaacaacactgtgaaattttcttccggaccctgttaagagtccggaagattccatatgccggcataagggaattgtaagggctgtggatgatcacaaaaagttaaaaacacggaaaaaaggggttgtctgtcttgtcaatggcctttatcgtgttgtataataataagcagatcatgaattaacatgtatttaaatttttaagaggaggctaatgtaaaatgccgtttaatcagaaaccacaaaagtttaatgcaaagattaacccagtgacaatcggaagcggagataagactgtaactattggcggagacagcacatttccattctatacctttgacgctccttcagagaactgcgctaaaatcggcgtagagatttctgatatgggtcttgagggaatgtccgagggaatcaaagcatactatgatggagcaactaccatgggagagatcgcaaagaaagctgcagctatggaaggcgcagatttcgttgcactgaatctggaaggcggagatcctaatggtgagaacagatccattgatgaattaatcgcagttgtaaaagaggttgctgaggctgtagattgtcctctggttgttgagggctgcaaaaacgtagagaaggatgcggaacttctccctaaggttgctgaggctcttgagggaagaaatgcactgattctttccgaaaaagaagaaaactacaaagcaatcggcgctgctgcaggtcttgcatacaatcagatcgtaggcgcagagtcagccgttgatatcaaccttgcaaaacagcttaacgttgttaccacacagcttggtgtggatgcaaagaagatcgttatgaatatcggaagtgcagcagcaggctatggctatgagtacgtagtttccactatggaccgtatcaaaggcgctgccctgggtcagaatgacaatatgctgcagatgcctattattacacctgtatccgcagagacatggggagtaaaggaagctacagcttctgaagctgacatgccggagtggggaccgcaggatgagcgtggaattgacatggaagttatgacagctgctgcagaccttgcagccggttccgatgctgttattttaagacatccggaatctgtaaaagcaatttccaagatgatcaaagcacttgcgtaacgaataggaggaaaatagagctatggcactgaatggtattcagatctttaaattaacaccaaagaaaaactgtaaggaatgtggatgcccgacatgtatggctttcgctatgaaagttgcacagggcgctatgcagattgagcagtgtccgcatatgtctgacgaggcactggcatctctttctgaggcaactgctccgccgatgaaaacaatcaagattggtacaggcgacggtgagtttactcttggaggagagactgtacttttcagacatgaaaaaacatttgtaagcaaaacaagatatgcagttgcactctgcacagatatgactgacgcagaagtagaagccaagcttgctgagatcccggttgtagattatgaccgtatcggagagagaatgcatgttgagcttgtatatgtaaactgcggagaaggcgcagatgtagcagcttacacagcactggtagaaaaagcaaaaggtcttggaagaactctggttctgggatgtacagatcctgagatcgctaaggctgctcttgaagtatgcaaggactccaagccggttctcaatggtgcaaatgcttccaactatgaggcaatgaacgctgttgcaactgaggcaggcgttgttctcggtgtatcaggaagcgacatcaacgagctttatgatacagtagcagctcttgagaagcttggaaacaagaaccttgttcttgacacaacaggcgctgacgtaaaagagacatttaagaacactgtactggttcgtcgtgcagctcttaaagatcaggacagaacttttggttatccgtctcttgtaaatcttgttaagattgctaaaggcgacaaacatttacaggcagcacttgcttccctgtttactatgaaatatggttccatcgttgttatggagcagatgacttatgcagaggcacttccgctttatggcctgcgtcagaacgtatttactgacccgcagaagccaatgaaagtagagccgggtatttacccgctgaacggagcagatgagaactctctggtagttaccactgtagactttgctcttacatatttcgttgtatccggcgagctggagcgttccggtgttccgcttaatcttgtgatcaacgatgcaggcggactttccgtacttacttcctgggctgccggcaagttttccagcaccagcatctctacctttatcaaagaagaggttgagccgaaggttaaatgccgtaagcttgtgatcccgggtaaggttgcagttctgaagggcgatctggaagcaaaacttccgggatgggagatcatcgtaggtccaagagaagcagtacagcttgtgaagttcttaaaagatatgcaggcataagccacataaatatacttcggacaggaaaggatctttcctttccaggtccgtattaaaccacgtaaaggagaacacaggtatgtcaaaatttatcacaattggtgaaagactttcaacaacagcaccggcagtaaacaaagcgtttacagaaagagatccggagccgatccttaaaagagcaaaacagcagcttgatgcaggcgctacttatctggatgtaaatatcggacctgctgagaacgatggtcctgaacttatgaaatgggcagttcagcttcttcagggcaactttgacaatgttccgctggcactggatacttccaacgtagcagctattgaagctggtatttccgtatacaaccgttccaaaggaaaaccgatcgtaaactctgctgacgcagcaggaagaatcgaatacgttgatcttgcagcagctaacgatgcgatcgttattgctctctgcaacggtgaaggtattgcaaaagacaatgatgagcgtatgatgttcatgcagacactgatggagcgcggtatggagcacggcatggatgttgagaacgatatgtggtttgacccgctgttcctggttatcaaaggaatgcaggacaaacagatggaagttcttgagttcattaaaatgatctctgacatgggcatgaagagtactggcggtctttccaacaactccaatggtatgccgaagcacatccgtccgatcatggattctgctatggtagctatggctatgatgcagggacttacctccgcaatcgtaaacccgaacgatcttcgtctgatggagactattaagtcttgtgatatcatcaagaataataatctgtacgcagattcttatctggatatctgatttttacatgtggatcacagagagggctggagacttcggtcttcggccctttctttatatcagaagaaaggtggttgctttttgtttaaggtaacatttgcatttgaagatggcagtgtggtagagacgtatgccaatgagggagataatctgctggaaatcgcacgtgaggcaaatgtggcgatcgatgccccctgttccggtaacggagcttgtgggaaatgccgcgtgcagctcaaatgcggagagctgaacaccaaaaaaacacttcacattagtgacgaagaatttcagaatggctggcgtcttgcctgtatgagcaaaattactgcggacgtggaagtgcttgtaccggatatcgcctctgcctataaaagcagaatgaaggttgcggacctgagttcgaaagaagagcttgctatttttgaaaatgccaagcgggaagtggagctggcaggaattgaattaaagaacagtctggacatcgtggaagtaaagatggaacctccaactctggacgacaccatgccggatgtggaaaggcttacccgggctctccgtaaatttatgaacctgaagcgtgtaaggattccttacgcagttctcagaaaactgccggatgttttgagagaaagcaattttacagtaaaatgtgtccttcgtacaactccggacgacatgtttgtttatgatgtttttgacagcagagaagaggttgtcatcggcggacttgcagtggatattggtacaacaaccgtatctgcagttctgatcaatatggaaacaggagaaatccttgcaaaaagttctgcaggaaacggacagatccgctttggtgctgatgtgatcaaccgtattattgaggcagagaagccgggaggaagagaaagacttcaggatgcagtgatcaaagaaacgattaatccaatgatccatgagatgtgccggagcgctcattttccggaaaaacagatctaccgtatgtgcgtggcatccaataccacaatgaatcatctctttgcagggatcaatgccgatcctcttcgtatggagccatatattccggcattttttaaaacaaattctatgtttgcttcagatattggcattgatatcaatcaggatgcccatatcatcatagctcctaacatcggaagctatgtaggcggagatattacagcaggtacccttgtcagcatgatctggaacagaccggagttttctctgtttattgaccttggaaccaatggagaacttgttttcggcaattctgactttatgatgagctgtgcatgttcagccggaccggcttttgagggcggagatatcagctgcggtatgcgcgcaacagatggggccatagaggcctgtaccattgataaggagactatggagccttcttataagatagtcggtgagccgggaacaaaaccggtgggactttgcggttccggtatcattgatgtgatcagcgagctgttttcagccgggatcattaatccgaaaggtaaatttatccgtgagggaagaagaatccgtcatgataaatacggtatgggaggttatgtgatcgccttcgaggaggaagcaggttcttccaaggatgtggagatcacagaggtggatattgataactttatccgtgccaagggagcaattttctcagcaatacgtaccatgctttcatcactggattttgatgtttccatgattgatgacgtgtatgtggccggcggaatcggaagcggtatcaatatgcgtaatgcagtaagaatcggaatgtttccggatattcctcttgaaaaattccattatatcggaaattcttcgctgtcaggcgcatacctgatgcttttgtccactcctgcggagaaaaagacatatgagttggctgcaaatatgacatatatggagctttccacagtgcccacctatatggatgagtttgtgggagcctgctttattcctcatacggacagttctctgtttccgtctgcagaataaaacaataaaagaatgtccggtacagaaacagagaaaatcctgtatcctgccggatgtataagaacaggaaaagaatcagattttacagaggtgtgctatgagttctgacttaaatgaagtaaaatccgtcagtctgtcagaggaagggtccgtaggcgacagactgggatatgaaaaagacagcaaggagagaatgccctgggagcattatctggaggagttccggaaagcagatccaaaggagatttccagtcgtctttccattccttatgatgaagcggaaaaaagctttgagcttccgtttctgggaagtgtctattacatttcctggcctgattttcatgtgactcacaaagaggataaaaaaggcttttatcctcttgaggaaatggtatatgccaggatcctgactattcgttttcttctgggaggaatgaaatcccatggaaccggaaaaatgaaaacctacagggaaatgccctggggagaagtgtatttgcggcagtttgacggacgctgcatcaaacgtcttgccttttcctatggaaatcgtctgaaggcttttaaagctgttatggagcatattcaggcagttcctgtaaaccacggggatcttgcctatgaaattgaaatttacccggattatcaggtacagatgattctctgggagggggatgatgagtttccgccttcgtctcagattctgttttcagataactttccggtatcctttcaggcagaggatatggctgtgatgggagatgtgatcatcggggctctgaaagcatttggaaaagtaacaggttaagataaaaaatacagttgtgacaaaagggatcagctgtgtatcatcatcaggagggtaaaactatgggattttcaacaagtacatgtacagagtttgttgaagtactggcttccaaagcaccggtaccgggcggcggcggcgcttccgcacttgttgcggcagtgggaactgcacttggaaatatggtaggaagcctgacagtaggaaaaaagaaatatgcggatgtagaagatgaaatgtgggagctgaaagcaaaatgtgatcagcttcagaaagatttcctccgtctcatcgaaagagatgcggaagtatttgagcctctttccaaagcatatggaatgccgagagaaacggaagaagaaaaggctgaaaaggcaagagtcatggagatcgttctcaaggatgcctgctccgtaccgatggaaatcatggaaaaatgctgcgaggctattgagctgatcgtggaatttggcgcaaagggctccaagcttgccatcagtgatgcaggcgtaggcgctgctttctgcaaggcagctttaaaaggcgccagcctgaatgtgtacataaacacaaaatccatggcagacagagagtatgcagaagagttgaacagaaaagctgatgcaatgcttgagaaatatacaaagattgctgacgaaacctttgacagtgttcttggaagactgaaataacagcagtatttttataaaaacagcagttttattttaggaggaataataaaatggcaaaacagttattgggaaaagaagtaacagcagcgctgaacgagaaaattaaagcaaatgtagcagagcttcaggcaaagggtgtaaatcctacactgtgcattatccgtgttggcgagaatccaagcgatatttcctatgagaaaggcgctaccaaacgctgcgagacacttggcgtagcatgtgaaaaaatccttcttccgggagacgtttcccaggatgagcttcttgcaacaattgataaagtaaacaaagacgaccatatccatggcgttcttctgttccgtccccttccgaagcatctggatcaggcagtgatcgaaaatgctcttgctgcagaaaaagacgttgactgtatgacagatctttccatgtccggcgtattcacaggcaaaaagatcggtttcccgccatgtacaccacaggcatgcatggaaattcttgatcattacggaattgactgcacaggcaaaaaagcagttgtgatcggaagaagccttgtagtaggaaaaccggcagctatgatgctggttaagaaaaacgcaactgttactatctgccacacaagaaccgttgatatgccgtctgttgcaagagaggctgatattgtgatcgtagcagcaggacgcgcaggcgttgtaggcgctgattatgtaagagaaggacagactatcattgacgtaggtatcaatgtaaatgcagaaggcaagctctgcggagatgttgactatgcagcagttgagccgatcgtagacgccatcacaccggtaccgggcggagttggaagtgttacaacatctgttctggttggtcatgtggtagaagcggcaatgagaaaggtaaatggatgattttttctcggaagaataagctcttctgggggaatctgaccctgacgggcgctctgattttcggggcgcctgtttttgcattggcagacaaagcgcctgatccgtcagaaatacagggccctgtaaggaaacctcaggaagaaaataaagctgtacagaaaaacggagactcagataacctgtcaggaaagactgacggaaacaacaaagacagggaaacagactattcagaagaaggacagatcagcaagccttcctattcttatgaaagtggtcccgggacagagggctttgtggatgattctacagataatacctatggctattatacgattatgggaacaaccactgttactctggaagaaatgacctccctttatgaggaaaacggggcagagtatccttcttctttaaaagagggcggtgcagaaaccattgaggatttctgcagcattattctggaagaagcggaactggaaggtgttcgtggagaggtggtttatgtgcaggccatgctggaaaccgggtggcttcagtttggcggagacgcagtggaaagtcagtacaacttttccggtcttggaacaacaggcggaggcgtacagggaaattcctatccggatgtgcgaaccgggatccgggctcaggtccagcatctgaaggcttatgccagcacagaggaattaaatgaaaactgcgtggattccagatttgatatggttacaagaggttccgctccctatgtggagtggctgggaatccaggagaaccctaacggaggcggctgggctgccggagccggatacggggagaagctgacaaagctgcttgaagatatgaaggaagaataatccggaaataaatatattttacagcaaataaccttgtctcattcgacgtttttgcttgatttttgcattgataaattaaaaatatttcatacaaataggtacaatagttacaggtgttaaaagaccttccgccttctactatctgaagctactgtacctttcttatatccattccgcccgtcagacacggccgggggagtgcagagggggttctgtcagagaaccccttctgcgtaatttactttaatccagtttgatctcttccagctctttttccggcagttttttggaagaatccttaagatactgcttcaatgctttggaggatgttgcaaagggaacgttggttcccgcgccgcccatgcagccgcccggacaggccataccctcaatcatacatcctttcagcttgcctgcctttgcaagagtcagcatttttttgcagtcagcaagagtttccgcatgttcgatatgaaccggaacttccggataatattctttcagacaggcttcgatggcgccggccacaccgcctgcaactgcatagccgcgtccggcagcagtggcattgtggagagattcatcgccctcaaaagaagccggatcgatctctctggcatcaaacatggcagaaagctcttcaaaggtcacgacaaaatccacatcgcttcgtacagaggtacgcatagcctccagtttttttgaggcacagggacctacgaaaacaaccttggcatccggatgctcctgttttaccttacgggcagtggcaaccataggagtaagttcctgagaaatattgtcgatcatgtccgggaaaaatttctttgccatcatggaccaggaaggacagcaggaggtcagaagaaacggaaggtttccggtagcaacttcctttgcatagtggtgcgcctcggaaatagctccgatatctgctcccagagcaacctcgtacacatcggaaaaaccaaggatctcaagggcagttttaaatttacgtggtgttacgtcttctccgaactgactgatataagcaggagccacaatggcaatgatcttatttccttcacgcagagagtgggcaagctggaaaatctgagatttgtcagaaatggctccaaaaggacagcttaccatacacataccgcaggaaacacatttgtcatccaggatttctgcacgtccctgttcgtcgcttccgatggcctttacgccgcaggcctgttcgcatggacggatattgtgagagatggcatcataaggacatacggctttacattttccgcatttgatacatttatcctgatcaatacaggatttgccattgatcatggaaatggcgcccttgggacaggcctgcatacatgggtgagccacacagcctctgcacatgtcgctgacaatatatttgttgggagggcaggccgcacaggcagagggaattacctgcataaggggcggttcataatatttttcatcaatattgctggcttccagtcctgaagtcagatgaaccgctctgttttccggacggagagaaagtcccattgcaagacgtacacgctcacttgccacagcacgctcacggtaaatgctctctctgtactgtgcccgttcttccacaatgttatagggaattgcctcaatgtcatgaatgagagtttcatctttggattcaaatccgacttttgccacttctgtaaaaattttatgacgtatctgttttacaggagtatccaggtttctcataatcactatcccctttgtgtatatttgtctaccagttcttctaatcatatatgaaaaaaattttaaaatcaatatttatcctgtacttttaaaagcacaagtgagacatatggggaaaaatgtcatcgtttggggtaaagtggcctgtatttggaccagattgctgaaaaatggatataaattgtatggtttacggtaagaatatctgtataattggagaaaaaataacaacaatgtttaaactataacaaactttttggttaattcacaaaatttcagaaaaatcagaagatagtacttgtggaaactgcctgtgtcatgtataattacaacatgagtaactggcgaaaatgaccaatgcaatggatgaaaggtaaggatacaagcgttaaggagggaaatgcatgttagatcagtcttattacacaaagacggacgagattattgagcactatggacgtaaagcggcgtccctgattcctattatgcaggatattcaggcagaatatcgctatcttcccggagagcttctcacttatgtggcggaacagatcggtgtgactgaggccaaggcctacagtgtggctacattttatgagaacttttcttttgaaccaaagggaaaatatattatcaaggtttgtgacggaacagcctgtcatgtgcggaaatccatgcctgtgaaagaagccatgatgaaggaacttggcttaagtcataaaaagcataccacagatgatatgctttttaccgtagaaacagtttcatgtctgggagcgtgcggactggctccaacattgactgttaatgatgaagtgcacccgaaaatgacaccggaaaaagcggtggagctgttggaagaactgagaggtgaaaaggcatgagtataatttcaaaggaagatctgctcaataagcagaaagaagttcagaatacgatcagtacctatacctgccgtgttcttgtctgttccggtaccggttgcatggcttccggagcacagaaaatatatgatgaaatgtcaaagctctgctctgatctggatggagtgcaggtggagatgcagaaagatattccccatcttggcgtggtaaaaacaggatgccagggtctttgtgagctgggccctcttgtaaggatcgagccgtatgattatcagtatgtgcatgtacagttggaggactgcaaagagatcgtggaccgtacagttcttcagggacagccggtagagaggcttttttacagagatcatgacaatatctgcccccatccggacgatattccgtttttaaatcagcagacccgtatcgttctggaaaactgcggcaggatcgatgcagagtccatagacgaatatattgcagcaggcggcttccaggccatgaccaaagcgttttttgacatgacgccacaggaagtaattgacgaggtaacaaaatccgggctgagaggacgcggaggagccggcttcccggctggaaagaagtggggacaggttgcccgccagaaagaaactacccgctatgtggtatgtaacggtgacgagggagacccgggcgcatttatggacggctccgttatggaaggcgatccctataagatgatcgaaggtatggtgatcgccgcttatgcagtaggcgctgaaaacggatatatctatgtgcgtgcagaatatcctctttctgtaaaaagactgcgtatggctattgaacaggcagaggcttacggacttctgggagacaatatcctgggttccggcgtaaacttccacttacatattaaccggggcgcaggcgcattcgtatgcggcgagggatctgctctgactgcttctattgagggcaacagaggcatgccacgtgtaaaacctccccgtacagtagaaaaaggtctgtgggaaaaaccaacggtcctgaataatgtagaaacttatgcaaatgttcccaagatcattcttcagggagctgactggttccgtaccatcggaacagagggaagcccgggaacaaagacgttttctcttacaggttccattgaaaataccggactgatcgaggttcctatgggtacaactctgcgtcatattatctatgacatcggcggaggcttaaagagcggcgctgcatttaaaggtgttcagatcggcggcccttccggcggctgtctggtagatgaacagcttgatcagccccttgattttgattccgtaaaaaaactggatgccattatgggttccggcggtctggtagttatggatgaaaatacctgtatggtagaagttgcccgtttctttatgagctttacccagagggaaagctgcggaaaatgtgttccctgccgggaaggcaccaaacgtatgctggagattctggagcggattgttgacggaaaaggaaaaatgtcagatctggatgaactggaagagcttgcaaccatggtccagagcatggctctctgcggacttggaaagagcgcgcctcttccggttatcagcactctgaaacgcttccgggatgaatatgaggaacatatccgggataaaaaatgtcgtgcaaaggtttgtacagcccttcgccagttccacattaatgaagagttctgtatcggatgcggcaagtgcgccaagaactgtccggccggagcgatcaccggaaagatcaagcatccgtatcatattgataatgaccgctgcatcaagtgcggtgcatgtaaggataactgtaactttgatgcaatttatgtggaagcgtagaagggaggaacgattatgggtacaatgaccattgacggtagaaaagttgaatttaccgatgaaaaaaatgtcctgactgtaatccgtaaagcaggcattaatataccgacactgtgctaccattccgaggtttctacctttggcgcatgccgtctgtgcacagtagaggatgacagaggcaggacttttgcttcctgttctgaagaaccgagagatggaatggtaatctacaccaactccggaaggattaaaaaatatcgtaagctgatcgtggagctgcttcttgcagcccattgcagagactgcaccacctgcattaaaagcggtgagtgtatccttcaggagctggcgcatcgtctgggcgtaagagatatccgttttgaaaatacaagagaggtgcgtgagcttgataccagttcaccgtctctggtgcgtgatccaaacaaatgtattctgtgcggcgactgtgtgcgcgcctgtgaagagcttcagggaatcggagcccttggctttgccttccgtggcacagaggctatggtaatgcctgcttttaataaaaaaattgcagagaccaactgcgtaaactgcggacagtgccgtgtattctgtccaacaggagccatctcaatcaaaactcatatggatgaggtgtgggatgctctttctgatcccaatgtccgtgtggttgcacaggttgctccggcagtccgtgtggcagtaggggatcattacggacagcccaagggacgcagtgtaatgggcaaaattgtcaatgcgcttcacagaatgggctttgatgaggtttatgacacaaccttcagcgcggaccttactattatggaagaaagcgcagagtttttaagaagagtggaaaagggtgagaaccttccgcttcttacctcctgctgtccggcctgggtaaaatttgtcacagatcagtataaagaatttattccgaatatttcaacctgcagatctccgcagcagatgatgtctgcagtgattaaggagtatttccgcgatccggaaaacgctcagggcaaaaagacagtaatggtttccattatgccatgtacagccaagaaggcagaggcaatccgtcctaacagctttacaaagggagaacaggacacagatattgtgatcacaacaacagaactgatccggatgatcaacaacttcggacttgattttgcggcactggagccggaagcctgcgatatgccctttggttttggttccggcggcggagtgatctttggcgttaccggcggcgtaacagaggctgtgttaagacgtctctctccggaacataccaaggaggccatgagagagatttccgagtgcggcgttcgaggcgatgagggaatcaaggaattcagcgttccttataaaggaatggaaatcaaggtctgcgtaacaagcggactggcaaatgccagaacggttatggaacgagtaaagaacggcgaggcagaatatcatctgatcgaggttatggcctgcagacgcggctgtattatgggcggaggccagcctacaagagccggcgacagaacaaaggcagccagagccaaaggcctttacaatgcagacaacacaatgatcattaaaaaatcagatgaaaatcctcttgtggtggagctgtatgatactctccttaaaggtaaagaacatgagcttcttcataatgaattttattaaatgaaataatgaaaaagggcgggtatgactgtgaaaagggcagttgatacctgcctttttcacaatatgtagtttgaaggcttgaagtcctaaaaaagactcataaaaaatcaatcagcatactgaacaatacagtagtgaggggggatttaaagatattttgctggatttgtaatgggaagagatcctgctgtaaacgatagcaaagaggcttccatatatttcttgcacctagcttccgtttgcgttaaaataatttaagaaataatgaatttaaaactacataaaagaggtgtcatcatgcgtgaaattcaagcatcacagatcacagaagtaattgagcgtctctgcatagaggcaaatacggttttgccgcaggatatgaaacaggcaatccgaacctgcagggcctgtgaggacggagaaattgccagaggcgttctggacaatattattgaaaattatgaaatcgcggaaaatgaacaggttcctatctgtcaggatacaggaatggcctgtgtgttcctggaaatcggccaggacgtacatattgcaggcggagatctgacggaagctgtgaatgaaggcgtccgcagaggctatgacaaaggctatctccgcaaatctgttgtgaaggatcctgtgcgcagaggaaataccggggacaacacacctgccatgctttacatagagatcgttcccggagatcagatcaaaattacggtaggtcccaagggctttggaagtgaaaatatgagcgccatccgtatgttcaagccatccgcaggcattcagggcattaaggattttattctggaaacagtagaaaatgccggtccgaatccatgtcctcctatggtagtgggcgtaggaatcggaggaacctttgataaggcggctcttcttgccaaaaaagcgctgatgcgtcccgtagattcagaaaatccggatccttattatgcagatctggaaaaggaaatgcttcagaagatcaatgagctgggaatcggtccccagggctttggcggcagaacaacagcagtgggattaaatatcgaaaccatgcccacacacattgcaggaatgccctgtgcaatcaacatcagctgccatgtgaccagacataagacggaggtgctttaagatggaacgacatattactttaccccttacagaagaaattgtaagaagccttcgtgcaggagattctgtttacctgacaggagagatctacacttccagagatgccggtcataagagaatgtgcgaggctctggaaagaggagaagagcttccctttgatccaaaggacgctaccatctattatgtaggtcctacccctgccaagccgggacaggtgatcggttctgcaggtcctactacaagcggaaggatggatgcctatgcgccaaccatgatgtctgtgggagcaagaggaatgatcggaaaaggcgcccgccttccggaggtggtggaagccatgaaaaaatatggcggagtttattttggagccatcggaggagccggagcccttcttgcaaaatgcatcaaaaaagcagagctggtagcttatgaggatcttcagtcagaagctttaagacgcctttatgtggaggatatgcctcttgttgtaattattgacagtgagggaagaaatctttatgaggagggaagggaagcctacctttcccataagagagattaatgttctgccataaacaaagctgacttggaatgcatgtcattttgtaaatcccgggacatacagggtaaaatgccatcgcccaaggtgatttggaatgcattttgaccaggttgctgtgttgtaaacagcaacataaattctgaaaaacagacaaaatttatccaaaataatattgacagcagtctgctttcggggatatactgaaagcagatcatggcatgggaaatgccggaataaaaacaaaatttttaattaaaggaggaagaacaaatggcagttatggatggatgcgaaagccagcacagaacttcagtaattgaagagagagtatgtccgaaatgcggaaaagaggtggaagtctttacttcccgcggaaagcttacagaagatactgtctgctcctgcggctatgtatttcaggcagaggaagcggttcctctgaaaacagagcacaaggataaataatcatcccgcggattagttcagaagtactgataaggctatattcaaatgatggaaacaggaacttcaggtttgtatttatgacaaatggcaaaccttcaggttcctgttttattttttggaagagactggtacggtatattttatttgtgaaaatttgtgttggtgttccggaattcagaaggcggaagccctgtctgttttttgaacagcctgctgaaatacagagggttctcataacccacaactgcagccacttcagaaacagaataggttgtagtgcggagcagggtttttgcatttgtgatccggagattgacaatatactgcataggcgtaaccccgttgtagcgcttgaagctgcggataaaccaacaggtactcatatgccgggacagggcataatcttccacggaaatgttttctgtaaaatgctcattaaaaaactgggtggcagcttccatttctttttggagaatctggttttgtgccgtgcccacaggggcctgacggttgactaaaagaaacagttcccgcagcaggattgaaaggtattcttcataatgaggcttggtaagctgcagctcctggatcatttttcggaaaatctgatgatattccggagaattgccggtctggatcacccgccctgtttcaaataaaccatattcctttaaaatattttttacattgctgcctgtaaaatgcacccagtaaacctctgtctggtctgctccgtaataaacatatttctgcatttctctgggcttatataaaatcatgtgcccggcttctataatctgttctttattgtcaaaaaagaaatgtccttttcctgcagtaacataaagcagctgatagtcaattcttcctcttggacgataggtgggaagcctgggctgatggatcagacggtaggtgccgcagcttcccacaaccagaggtctggttttgtccttaaaatccaacaaagaattatgcagatagccggaattgatatacataatggttcctcctgtttcagaaaatatcctgcgatataaaaagtgtatcattttgtgcatattttgtccaatgaagtttatggacgaacaatgtaaaaaagacgtaaaataacgttaaatcaaaggaaaagtaaaagaaagcaaggaggaacacgttgtgattgtgccaaaatattatgaggacttaaaaatagtgcatgaaaataccatgccttacagagcctattatattccggcatcccattatatgggttcgctgacagaagacaggtttttttcggaccgtatcatggcgctgaacggaacatggcagtttcagtatttcagcagtatttatgatgtgcaggaaaaattttatgaaccggattatgactgcagcagttttagtgaggtggaggtgccgggagtctggcagaattacggatatgacagccaccagtataccaacgtaaggtatccgattcctctggaccctccctatgtccctcaggaaaatccatgcggagcctatgtgcgtaaattttactacgaaaaatcagaagaagctccaaaggcatatctgaattttgagggtgtggattcctgtttttatgtgtgggtaaatggggagtatgcagggtacagtcaggtttctcatgccaccagtgaatttgacgtgacagaggctctggtaaatggagaaaatactctggccgttctggttctgaagtggtgcgacggaacctatctggaagatcaggataagtttcgtatgagcggaatcttccgggacgtctatcttttgaaccgcccggaaaacattgtgtatgattattttaccacaacagaaatccaggaagatcagtcagtgatcacggtgcaggcaaactatcagggaatggctgttccaacaaagcttaccctgtatgatgcagagaaacaggaaatcgcttctcagatgctttgggaagaatccggagagctttatactcataaggcagttcttacagtaaaaaatgcaaagctgtggaatccggagcagccttatttatatactctgctaatagaaacacagggagaagtgattgcagaccggatcggtatccgggaaatctgtgtgaaggatgctgtcatctatctgaatggcactgctgttaaatttaagggagtgaaccgccatgactcggatccggtgaccgggtttgtcattgggcctgaccagatgaaaaaagatctacagatgatgaaggaaaacaactttaatgcagtccgcagcagccattatcccaatgcgccttatttttatcagctctgtgatgagtatggattttttgtgatcgcagaggcagacaatgaaagtcatggaacccagtcccagtatttaaaagattccagctgggaaaatgtaagccagaggtggaatgagaggatttctgataacccggatttcataccggctaccctggaccgtaccagactttgcgtacacagggagaaaaaccgccctagcattgtgatctggtccatgggaaatgaatgtggctatggctgtacctttgaggaagctttaaagtggacaaagcagtttgataaaacaaggctgacctgctatgaaagctctttttatcggaataataaaagaaaatacgattacagcaatattgatattttcagcagaatgtatccttctctggaagaaatccaggaatatatggaacagaaaccggataagccctttcttttgatcgaatactgtcatgccatgggaaacggaccgggagatctggaggattatttccagatgatttatcaatatgaccagctttgcggaggctttgtgtgggagtggtgtgatcatggagtgtaccggggaaaggctgctaatggaaaagaaaagtatttttacggaggagattttggggaagaggtccatgacggcaatttctgtatggacggactggtatatcctgaccggacacctcataccgggcttctggaataccggaatgtgcaccgcccggcaagagtggtgactttccggcaggaaaccggagagctgtgcctgaaaaattatatgaatcacctggatttaaaggattatattgagctggcattggaagtgacctgtgatggaaaaatcctcaaaaaggaagaaatggaactgaaggagtccatactgcccgggcagacaggaagcatttttctggatattccggttccggaacggggaaaatgttacctgaaaatatcctattacttaaaacagggaaatgcccttgttgttcccggaagtgtgctgggatttgatgagatattgttgaaaaataaagatggtagaaatcagcaggcggtgtgtattctggaaaaccggagagaggatcaggcatctgtgcaggttacggaaacggatcggttccttactatcgaaagcgagaagtttacatatcgctacagtaaactttccggattatttgaacaggtaagcttaaatggaaaggaactgctggctgcgccaatggaagtgaatatctggcgggcgccaacagacaatgaccgaaagatcaagctggaatggaaggcagccggatatgaccgcagcaaagccagagcttatgatacaacatgggagataaggagaggagctgccggctgtgtcaatgatgaaagcgttatcatccacagcaccatgtctgtggcggcagcagcgcttcaaaaggttctggatatcgaagccgaatggaaggtacagagtaccggagaaatctctgtaaccatgcaggtaaaaaagaacatggaatttccacagcttccacggtttgggcttcggttatttttaaagaaagagtatgaaggcctgaaattctatggactggggcctcacgaaagctatgtggataagcgcagatcctgcagccatggcctttatgaatccacagtagaagagcagcatgaggattatctgcgcccccaggaaaacggaagtcatacagactgtgattatatggtcctggaaaaagaagcacagacttttatggctgtatctccaaagccttttgcatttaatgtatcttattacacccaggaagaactgacagaaaaggcacataattttgaactggaaaaatcaggcaacactgttgtctgtctggattatgggcagaatggaatcggctccaacagctgcggtccaaagcttcgcaaagaatatcggctggatcaagaaagatttacatttgagatgatgtttatttggaaaggaatgagaggaacacatgaatgaaaaaaagtatttaaaatggtacaacaaagtaggatatggctccggggatattgcaggaaatgtggtctatgcgtttttgtcctcctttgtcatgatttatctgacaaatacagtagggctgaatcccggaattatcggaactctgattgcagtgtcaaaattatttgacggaatcacagacgtcttttttggctctctgatcgacaaaacaaaaagcagactgggtaaggcaagaccctggatgctgtatggatatattggctgtgccgtaacactggtggctatttttgctattcctgctgacatgggagagtttgcccagtatgcctggttctttattgcctatactctgttaaacgcagttttttatactgcgaataatattgcctattctgccctgacagccctggtgacaaaaaacagcaaggaacgtgtacagatgggttcctatcgttttatctttgctttttcaaccagtcttctgatccagtctctgaccattggatttgtggaatggatgggcggcggagctgccggatggagaacagtcgctattatttatgcagtgatcggacttgcagtgaatacgatttccgtattttctgtgaaggaactgccggaagaagaattaaatgatggaaaagcagccggaacagatgagaagtattccctgatcgatgccggaaagcttttatttaccaataagtattatgtaatgatctgtatcacctatattttgcagcagatttatactgccatgttaaacatgggtatttattatatgacctatattctgtttaatgaaaatctgtacggtgtattttcctgggccataaatatccctttaattattgcgctgctggttacgccggttctggtggaaaaatggaagggtatgtacaaactgaatctgacgggatatgtgatcggaaccattggaagggctctggttgtagtagccggttacctgggaagcgtgccgctgatgcttttatttaccggcatcgcagcctttggtatgggaccctggcagggagatatgaatgcagtgatcgcttcctgttcggaatatacttatctgacaaagcacaaaagagtagacggaaccatgtactcctgtacctctcttggcattaagctgggaggcggaattggaatcgccattaccggctggcttctggatctcagtggctttgacggagctttgggtgtacagagtgattcctgtatccagatgcttcagatcatgtatctttgggttccggtggcaatcacactgattattacatttatcatgtcaaaaatgaacgtggaacgcgccaatgagaaacttttacaggaacaggctgttaaaagcgatatgtatgattaaaataaactgcatagaaatccatgacttcctgtaaatagttgataagctttttcataaggctgtacctcctttcctgatttctgaccttattatactctatcagaggaagatatgcatgccaaatgaaaaaaagaagcagccaaattttgaagagagaggagaaggaacatgcagccgtcttatgaagagaaaaaagaaaagttcagtataataagaaaaaaacctcatcatgttccccctcaccttcacaatgccattgagctggtatatgtaacaaaaggggagctggagcttggcgttggctgtgagctgtatcatatggagcagggagattttgcagtggtatttccggatctgatccatcattatcaggtgttctctcatggaaaaaatgaagtatatctgttttatgcatcgttggagctcagtggaccgtttatgaccttgcttcagaaaaaatgtccggaaaatccagtgatttccaggggaaaattacacgaggaggtcaaaaatgcgttaggctgtctgataaaagacaagaaggtaaacgaggttgtggggcaggcttatttacagattatattataccggtgcagggagaacttccggttcatagaaaaagatcgtgtggggagtaatgatctgatatatacggttatgacgtatctgttgtctcactttcaggaaacgctgacacttggaagtgtggctgaaaatcttggcgtaaataagtttgctttatccaaaatcttttccggtgtttttcatacgaattttaatcagtatcttaatgagatccggctgaactatgcttcctctcttctggaaaatacagacaggagaattacggatatttatctggaagccgggtttgaaagccagagaacctttaatcgtgtctttcggcagagatatggaagaactcccggcgaatacagaaaatcgttctgggaacaggagaatacagacatcatgaaaacctgatcataaaataaaaggcttctgcccgcttcatttacagtaacaataacagacctgtttcagagatttgtctcaaaagtaacatgaataaaatgtctcctgcatataaatataacaatacatgggattgtgtgaatatatgcaagggggcatttttatggaaaattttcaggtttaccgggatattcaggcacgtaccggcggtgatatatacataggtgttgtaggacctgtccgcaccggaaagtccacatttatcagacgtttcatggagcagctggcccttccggcaatgagcggggagcagcaggcagaggtaagagatcagcttcctttaagtggttccggaaagctgatcacaacagtggaaccaaagtttattccaagagaggcggttccggttactctgggagaggatcagaaggttcggatccgtctgatagactgtgtaggttatttggttaaagatgcttccggccatgtggaggaaggcagagagagaatggtaaaaaccccctggtcctccagagccattcctttccatgaggcagcagaggtgggaacaggaagagtgatccgggaacattccaccattggacttctgattacaggggacggaagctttggagaaatcccaggcgaaaatttcagagaggcagaagaaaagacagttcaggaattaaaaaaacagggaaaaccctttctgatcctggtaaattctcagatgccgtataaagaagaaaccttacagcttgcagaaagccttcagaaaaaatacggagtgacaacggtcacagctaactgtgagcagctgaaaaaagaagatatcaccagaattctggaaaaggtgctttatgaatttccggtcagtgaaattcatttctatgtgcctaaatgggtagaaatgcttcctatggatcatgaactgaaatcacagatcctgggacagatccggaagctgatgaaggagttggctcatatccgtgatgtgactaaggaaagggtgcagctggaaggtccttacgtgcaggatactcttcttgatcatgtaggactttccgatggcgttgtcagaatacgggtccagatcaaagatgagtattattacaggatcttaagcgagctgtgcggagtttccatggcaagcgagtatgacctgatccatacgatgaaagagctttcccagatgaaagaaaaatatgttaaggttcagtctgctctggaagcggtccgggggaccggatacggtgtggtggtgccggagcttggagaggttgagattgaagagccgacggtgatgaaacagggaaataaattcggggtgagaatccgttcaaaaagcccttccattcatatgataaaagccaatattgagacagagatcgcgcctatagtaggaacagagcagcaggcgcaggatctgatccagtatatcggacagagcggccaacggggcgaaagcatctgggagacaaatattttcggcaagtccatagaacagcttgtacaggacggcatccggaataagctggcttccattggagaagaaagccaggtgaagcttcaggataccatgcagaagatcgtcaatgacagcaagggcgggatggtgtgtattatcatctgagcttttttgtatcaaaaaaagaatagcaggggacagcagcttcttcagatggtaaatgcgggagctgttctgtgccggaagcaggaacgctgtttaaatgaagagctgctgtggtttatgttctgttaaaaaaagaatatggactgtggcagtttttccatttcataaaaacttctgaaaataaagattgacattttatggcaattgtattatcatactaacatacaaagttagtatgtaattaaaaagaaaggcggaactggattatggcaaaaatttacaaaggagcgctggggctgatcggaaatacccctctggtagaaatatccaatattgaaaaagaactttctcttccggcagctgttcttgtgaaactggagtatctgaatcctgccggaagcgtcaaggacagagtggcaaaagcaatgatcgaggacgcggagaaaaaaggcctcctgaaagaaggttctgtgatcattgagcctacctcgggaaatacagggatcgggcttgctgctattgcggcagtcaagggatatcgggtgattcttaccatgcctgagaccatgagtgtggaaagaagaaatatcctgaaggcatacggagcagagattgtccttaccgaaggcgcaaagggcatgaaaggggcgattgaaaaggcggagcagcttgcaggagaaattccgggcgcctttattcccggacagtttgtaaatcccgcgaattctgcagcccacagatcatcaacaggcccggagatctgggaggacacagagggaaaggtagatatttttgtagcaggcgtaggcacaggcggaactctgaccggtgtgggagaatatctgaaagctaaaaatcctcagatcaggatcgtggcagtagagccttcggattctcctgtactttcagaaggaaagagcggccctcacaagcttcagggaatcggcgcaggctttgtacctgaggttttaaatacagatatttacgatgagatcattcagatcagaagtgaggaggcatatgcagcgtcaaagcttcttgcaaaaaaagaaggcgtactggtaggaatttcctccggagcagctctttatgcagcctttgagcttgcacggcgtccggaaaataaaggaaagaccattgtagccctccttccggattcaggagaccgatactattccacccctctgtttatggaatagtaaaaacaacgattgtctggcagataaagaataacgaggagtaaaattatgggtgaaaaaatcagaagagaaaacaggaaatttaagtttgagacacttcagctgcatgtaggacaggaaaatccggatccggcaacagatgccagagcggttcctatttatcagagctcttcctttgtatttcgcaactgtgaccatgcggcggcaagatttgatctaagtgatgcgggaaatatttacggaaggctgaccaatcccactcaggatgtttttgagaaacggatggcagccctggagggaggagcggcagctcttgcagtggcttccggggcagcagctatttcctattccattcagaatgtggcgcagaacggtggtcatattgttgcggcaaaaaatatttacggaggaacctttaacctgcttctccacacacttccccagtatgggatcacaaccacctttgtagatatttttaatgacggagagctggaagcagccattcaggataatacaaaagctgtgtttattgaaactctgggaaatcctaattcagatgtggtagatattgaagcagcagcccaaatcgctcataagcataaaattccccttattgtggataatacctttgcaacgccttatctggtgcgccccatagaatacggggcagatattgtggtacattctgcaacaaaatttattggcggacacggaacagccgtgggaggtgtgatcgtagacggaggaaaatttgactgggaggcatccggaaaatttcctgttcttacagagcctgacccaagctatcacggaatcagttttacaaaggcggcaggtccggcagcctttgttaccaggatccgtgcgatccttctcagagatactggagccactctgtcgccttttcatgcatttctgtttcttcagggactggaaactctgtctttaagggtagaacgtcatgtggaaaatgcgcttaaagtagcggaatatcttaacagtcatcctcaggtggaatgtgtccaccatccgtctgtgacacaggatgaaagccagaaagctctttatcagaagtatttcccaaagggcggcggttccatttttacctttgagatcagaggcggcaaacaaaaggcaaaagactttattgacaatctggagctgttttctcttctggcaaatgtagcggatgtgaaatctctggtgattcatcctgccactaccactcacagccagtgtacggaagaggagcttcttgaacagggaatccggccgaataccatccggctttctgtgggaacggaaaatatcgatgatattattcaggatctggaagaggcttttaaggcagtgctgtgaggcatgtaagccgaaaatggaagtagttactgcgaaggttgtgaacaataaccggaagtcccaatgacagaataaaacaaaagagaacttcttgaccgtaacatgtctctgcatgtatactgtaacggagttctcttcttttacagtaaaaaagaagaaaacatcagcagaacggagaatgttatggatacaaataccttagagaccaaccagataaatgagaccgggcttacagaagaggatgcccggaatgtaagaatacgggaaattgagagaagtattataaaaaaattccgcaagcctgtatggagacgttttacaaaagccatcaatgaatatgagctgatcaaagacggagataaaatcgctgtgtgcatttccggaggaaaggattccatgcttatggcaaagctttttcaggagctggcccgccatggaaaaaagaattttgaagttgtttttctcgtaatgaatcccggatataatgaggcgaattatcagcttatcctagaaaattccagaacccttggaattcccattacggtttttcagtctgaaatttttgacgtggtggcaggagaggaaagctctccctgttatctctgtgcaagaatgagaagaggatatctttacagcagggcaaaggagcttggctgcaataagatcgctctgggccatcattacgatgatgtgatcgagaccattcttatgggaatgctttacggagcccagatacagaccatgatgccgaagcttcacagcaccaattttgagggaatggagctgatccgtcccatgtacctgatcagagaggaagatatcatccactgggcaaactacaacggacttaggttccttcggtgcgcctgccgctttacagagcagtgcgcagatgaggaaacagataaaagctcaaaaagagcggaggtaaaggaactgatccataatcttgctcagaaggatcctgtaattgagtttaacatatttaaaagtgtggaaaatgtaaacgtcaatactgtggtggcatataagaaagacggagtaaagcatcatttcctggaaacgtatgatgaaatatagcagaaagaggccgttaggatgaagatatcaacaagaggacgctatgcgatccgcgttatgctggatcttgcggaacacaataccggagaatatatcccccttatggatattgccagaagacaggaaatttctgaaaaatacctggaatccattgtgtctgttctgagcaaaaataaatttgtccatgctctcagaggaaagggaggcggctaccgcctttccagaacgccggaggagtacactatgggcagtattttaagacttacagaaggctccctggcgcctatcgcctgtctggaggatgagccgaatctctgtgagcgcgcttctgtctgtaagactttaagcatgtggcagggattttataagctgatcaatgaatatttcgatcatattacacttgaggatcttctccgggagggagaagacggcggaagctatgtgatctgagcagatccggaaatgaaggtttctattatttttcagaaaatttattgaatcaggaagccttgtgtgatatagtaaaatcagttcaaaaggaaagaaacggggcagcagaaatgaatcagaattttttggatgcagtggaagaaaatcctgtgatcgcagcaataaaaagtccggaagatctgaaagaatgctgcggtatcccggagattaggattgtttttatcttatatggggacatctgttctcttggagagattgtgaaggcagtgaaggatgcgggcaagatcgccatggtacatgtggatctgatcggcggactgagcacaagagaggtagctgtggattttatccataccagcaccatggcagatgggatcattaccacgaaaccctccctgatccgaagagccagagaattgtccatgtttaccgtcctcagatttttccttctggattccatggcatttgaaaatatctgccagcagcagtacagtgtaaagccggattttattgaagttcttccgggagtgatgccgcgcatcattgagaagctttgtcatctggtaaaaataaagattattgcaggcggactgatctcagacagagaatccgtggtggcggcgctggatgccggtgcaatgggagtttcctctaccagtcatcaggtatggaggttatagaaacagaacaggaatcctgttcggacaactgaaaaagaaaaggcatgagagaagagagcctgacagatagcgcatagattctgtgcgtttatttgtcgggctttttcatttaccaggaaattcatatattgtgtactgactttcccggtgaataaaaatgtatcgaaaaaaggagcagagactatgtatgatgtaattattatcggggcaggggtaacgggaactgcctgcgcaagagaattatcccgttatgaggcaaagatctgtgtactggaaaaagaagaggatgtgtgctgcggaacctcgaaagcaaacagcgccattgtccatgcaggctatgacgctgcggaaggctccctgaaggcaaagctgaatgtcaggggaaacctgatgatggaagagctttcagaaaaactggattttccttttaagagaaacggctctctggtgatctgtcttcataaagaagatttttcaaagcttgagactctttatgaaaggggacggaaaaacggggtgaaaggacttcagattctttaccgggaacaggtgaaagaaatggaacccaatataactgatgaggtatatgcagccctctatgcgccttcagccggaatcgtatgtccttttgcaatgaacctggcttttgcagaaaatgctgctgccaatggagcagaattccgattcgatacagaggtacagaatatcagaaaaacctcacagggctgggagattgaaacttccaaaggagttttcctgacaaaaacagtgatcaatgcagcaggagtttacgcagaccggttccacaatatggtcagtgaaaaaaagctttgcattaccccaaggagagggagctactgccttctggacaaaagcgcgggaacccatgtgaacagaactgtattttctcttcccggaaaatacggaaaagggattcttgtaacacctacggttcacggaaaccttcttctgggcccaactgctgaagacattgaaaacaaagagggaacaaacacttctgcgcaggagctggagcaggtaatccagaaagcaggcatgaatgtaaaaaatcttcctctgagacaggtgatcacttcctttgcaggccttcgcgcccatgaggaaggggatgattttgttatcggtgagtctgaggacgcgcctggttttgtggactgtgcaggaattgaatccccgggacttaccgcagctcctgcagttggagaaatggtttcgggcatcctgaaaaaaaggctgaaccttaaagaaaaagatgcttttatttctgagagaaagggcattcttaatccggcagcgctggacaaagaagaataccgggagcttttgaaaaagcagccggcctatggaaatataatctgcagatgcgagatggtttcagagggagaaatccttgatgccatccatcgtcctctgggcgccagatcactggacggcgtcaagcgcagaacaagagcaggaatggggcgctgccagtcaggcttctgctctccaaaaaccatggagatccttgcccgggagcttggaaaggatatggcagagatcaccaaatgcggaaaaaattcacaaatcattctgggaatcaataaagatacattctgaccagatacaggaggagctactatcatggaagcatatgatgttgtaattataggaggcggtccggcaggattggcggcggcagttgctgcaaaagaacacggtatacagaaaattctgattctggaaagggacagagagctgggaggtattctgaaccagtgtattcacaatggcttcggtctccacacgtttaaggaggagctgacaggcccggaatatgccctgcgctatataaaaaaagtacaggagcttgatattgaatacaggctgaataccatggttgcagatatcagtccggagagggtgatcacggctctgaaccgggaggacggacttctggaaataaaagcagaagcagtgatccttgccatgggctgccgggaaagatcaagaggagctttgaatattccgggatatcgcccggcagggattttttccgcaggaacggcacagagactggtaaacatggaaggatatcttccgggtcgcaaggttgtgatccttggttccggagatatcggacttattatggcaagaagaatgactctggagggagcaaaggtaaaggcagtggcagaactgatgccttattccggcggcctcagaagaaatattgtgcagtgtctggaggattatggaatccctttaaagctcagtcacacagttgtggacattaaaggaagggaacgggtggaaggagtaacgcttgcaaaggtggatgaaagaggaaagcccattccgggcactgaggaagaatacgcctgcgatactttgcttttgtcagtgggtctgatcccggaaaatgagatatctggaaaaatgggtgtggagctgaatccggtaacgtcaggtccggtggtaaacgaaagtctggaaacaaatatccccggagtatttgcctgcggaaatgtactgcatgtgcatgatttggtggattttgtgtcacaggaggcagccgcagccgggcgttttgcagcggattttatcagaaataaaaaatccttccaagagaatcaggagagagaagagatacgagacagtcatgagatccgtattatttctgacggcggtgtccgctataccattccctcttttatccggccggaatatatggaagaaagccttacaatccgcttccgggtgggccgcgtttaccgggactgttatgtgtgtgtttactttgacgaaaagctggtaatccgcaaaaaaagattatatgcagccccgggcgagatggaggagctgattctgaaaaaagctcagcttatggaatatcccgcactgaaacagatcaccataaaaattcaggaggcataaaaatggaggaaagacatttaatctgtataggctgtccggttggctgcgccctgactgtaaaaacagaacagggagcagtgatatccgtagagggaaatacctgtaagcggggaagggagtacggggaaaaggaggtgacggcccctgccagaaccgttaccaccacggtaacggtaacaggtgggaaaattcccgcagtctctgtaagaaccagaacagatattccaaaagaaaaaatctttgactgtatccgggcgctgaaaggtatccagattccggcgccggtgcatacaggcgatatcatacttgccgatgcggcaggaaccggagtagatgtagttgccacaaaaacagtggaattacgctgactgtttaacggagagaacagtaacccggatgggaactatttaggggaaaaatgtcagccagcattgacattgagcgttgtaatgtttatcataaagaatagtatgttcagtcagcagatatataaattttgcggcagctgaagatatgtctgaacaaaaaggagaaacattatgaccatttccatgattggaatagatcacggtcgtgcaccggtggatatcagggcattatttgcctttacaaagaaaaacgcaggggaagctatggaaaagctgaagcatacagcaggcatacatggctgtgtgattctttctacctgcaaccgcctggaaatctgggcaagccatgaagaagatcaggagctttccctgtatcagtgtctttgtcggctaaaaggagtacaggaagtttcctatgaaaaatattttgttatacgaaaggataaagaggcggcagctcacctgttttatctggcaggcgggctgaagtctcagattctgggagaagaccagattcttactcagattaaagatgctctgaatcttgccagagaacattttacctcggacagtgtgttggaggttcttttccgtatggcagtaactgcaggcaaaaaaattaagacagaggcgcctcttgcccacggaaatccttctgtgatccatcaggcagtctgttctctgaaatctcagggctatgaaataaaagggaaaacctgtatggttatcggaaacggagaaatgggaaaggtagctgcccagacactccgtgaggcaggggctgatgtgacggttactgtgcgtcagtaccgaagcgggattgtggagatcccggagggctgcaaaagaatcaactatggcgagcgaatggagtatcttcccaaatgcgatctggttgtcagcgcaacggcaagccctaattttacattaagagaagaacagttttctgacctcacacttccggaagagctgatccttttggatctggcagtgccaagagacattgatcctgctcttggaaagcggaaagaaatcagactttacgacatggacagcttccattcgtctgaaatatcttctgagcagagtgaaagcatccggaaggcagaacagatcgtagaagagcagatggaggaattttatcagtggctggagggccgggatgtgattcccaggatccaggagatcagagaggatgcggtacaggatctgaacctgcgcatcgaaaaaatcctcaaaaaaacaccaatggaacaaaaggacagagaaagcctgcttgaagcagtggatactgctgccggaaaggttgtgaataagctgatcttcggtttaagggatagcctgaatcaggaggtttttctggaatgtgtggccggattggagaagctttatgaagactaaaagatattttcccatgtttatagatctttcagacaaaaacgtggttgtagttggcgggggaaacattgccacccggagagtcaagacactgcttcagtttacaagaaacgtaacggctattgccccaaaagtgactgaggagcttcgggggcttggaacggcaggctatgtaaatctgattacccgtcctgtaaagcgttcggattttcagacggcatatatggtgatcgcagctaccaatgactggaagctgaatgatgaaatttaccgcgtctgcaaggaagagggcatttatgtgaatattgcggacgataagagcaagtgtgatttttattttccgggaatttatatgaaggatgaaatggtagtgggaatcactgcaagcggactggatcatcacaaggcaaaaaaggtccggatcgccattcagaaagccatggaggaagcagcggaaaatgacaaagaataaaataatcatcggaagcagagaaagcgctctggcagtgctgcagagtgagatggtaaaaagctttctcaataaagagcatccggaattacatacagagatcctgaccatgaaaaccacaggagacaaaattcttgaccgtacccttgataagattgggggaaaaggactttttgtaaaagagctggatcttgctcttatagagaaacggtcagacatttctgttcacagcctgaaggacatgcctatggaggttccctctgagcttccgcttctggctttttcaaaaagagaagatcccagagacgttcttgttcttccaaagggcgcagatcatctggataaaagtaagcctcttggctgttccagtctccgcaggacgttacagctgaaagagctttatccggatatggaagtaaaaagcatccggggaaatcttcagacaaggcttcggaagctggatgaaggagagtatgcgggactgattcttgcggcagccggcctgaagcgcctggggctggaaaacagaatcagccgctactttacagtggaagagatgcttcctgcagcaggccagggaattctggcagttcagggaagggcagaagaagattattcctgcctggaggggtactgtgacagggaagcctggatatgtggaacagcggaaagggcctatgtaaaatatctggacggcggctgttcctcccctgtggctgcctatggtgagcttcacggagacacactgctgctccgggggctttattacagagaagaagacgggacatatataaaaggccagctggagggcgatcctttaagagcagaggagctggggattactcttgcaaagcgtctgaaagaatccatggaaaaaggagagtcatcatgagtattggaaaagtatggctggtaggtgcaggtccgggagatgccggactttttactctgaaaggccttgaggttcttaataaagcggaagtagttgtatatgacagtctggtaggtcagggagttctcacaaaaatccctgacagcgcaaggctgatctatgtgggaaaacgggcagacaagcatacccttccccaggaacagatcaatcaggtgcttctggaggaagcgcagaagggatatcgggtggtgcggctcaaaggcggagatccttttttgtttggaagaggcggagaggagctggagcttcttacagaacacggaatcccttatgagatcgttcccggtgtaacctctccgctggcagttcctgcctataacggcattccggtgacacacagagatttctgttcttctcttcatattattaccggacacagaagagcaggaaaagagtatgacattaatttccgggctcttgtggacacaaagggtacgcttgtatttttgatgggagtagcagctcttcacgatatctgtcaggggcttctggacgagggcatggaaccggaaatgcctgcagcgattttgcagaagggaaccacagcaggacagaaaaaaatcgtagccacagtcagcaccctggaagctgaggtaaaacgtcagggaatccagacgcctgctattattgtggtaggaaaggtctgcgctcttgcagatgaatttaactggtatgaaaagcttcctctgatgggctggaaggtgcttgtcacaagaccgaaaaacagaagctcccgcaccacagagcttttacgggaaaaaggagcggaggttctggagcttccttctatccgtacccaggcgctggaagatcagaccgcgctttatcaggcgctgaatcacatttcagattatcagtgggctgtgtttaccagccctacaggggcagaaatctttttggatgagctgaaacgccgcagaatggatatccgcagtcttgccgggatccgtcttgcagcgatcggccagggaaccagaaagattctggaggatcgaggccttctgactgatctgatgcctgagatctatgacggtgactgtctgggcgagacacttgcaaaggagctgaagggcggagagcggatcttgatcccaagagccagaaaaggaaacgagaatctggtgcggcttcttaaggaggcaggcggtattgttgacgatatccccacctatgaaactctttatgagagcagcagtctcattgacataaaaaaagaaatcactgacaaaaacatagactgtgtggtatttaccagcgcgtctacggtaaagggctttgcggaaagcaccccgggcgctgattataccggacttactgccgcctgcatcggaaagcagacaaaggcagcggcagataagcttggaatggatatttatatggcagaaaaagctaccatcgaacatctgatccgactggtagaagaaataaaacacaaaaaggaaagagagtgagaaacatggatttaatccagagaccaagaagactgagaggtagcgagacactgagaaaaatggtgagagagacaagaattgacaaatcctctcttatctatcctctgtttgtccgtgaaggaaacaatatagaagaggaaattccgtccatggaaggtcagttccgctacagtgtggaccgtcttccctatgaactggaaaggctttcaaagacaggcgtaagcagcgtaatgctgtttggcattccggatcataaggatgaggtgggaagcggagcctatgcagaaaacggaattgttcagaaagcccttcgggaggcaaaaaaacagtttccggatatgtattacatcactgatgtatgtatgtgcgaatacatctcccacggacactgcggcgtactctgcggccatgaggtagaaaatgatgccactcttgagcttctttccaaaactgctctttctcatgtagaagcaggagccgacatggttgcaccctctgacatgatggacggccgtgtgcgtgccatccgtcagtgccttgataaaaacggacataaggaaacaccgatcatgtcctatgcggtaaaatatgcgtctgctttttacggtccgttccgtgacgcagccggttcagcccctgcctttggcgacagaaaaagctaccagatggattatcacaaccgcagagagggcatgaaggaggctcttacagatattgaagagggagctgacattattatgatcaagccagccatgtcctatcttgatatggtttccgaggtacataaggcaaccaatgttcccattgcagcttacagcgtaagcggcgagtatgccatggtaaaggctgctgcaaaaatgggatggatcgaagaggacaagattgtgtgtgaaatggctgcaagtgcgtatcgcgcaggggttcagatctatcttacctattatgcaaaagagcttgcaggatttattgacgaagggagaatcggctgatgacaagatcagaggaattatttaaccgtgcagtaaaaaggattccgggaggcgtcaacagtccggtccgcgcttacggagccattggggaagcccccagatttatcgaccatgcagacggatgctatatttatgatgcagatggaaacagatatattgattacattgattcctggggtcccatgatccttggacacaactttccggaaatccgggaggctgttttaaaggcctgcgaaaaaggcttaagctttggttgcgccacagaggttgaggtggagatggcagaatttatctgtgaacatcttcctcatgtggagatggtccgtatggtaaattccggcacagaggcagtgatgagcgctgtccgtgcagccagagggtttacaggaaaaagtaagattattaaatttgccggctgctatcacggacacagcgacgcgcttttagtaagcgcaggctcaggagttatgacaagcgggattccggacagcgcaggggttccggcaggctgtacccaggataccatgactgcggtttacaatgatctggacagtgtaaaaacactgatggagcaggcaaaggatcaggtggcggcagtgatcgtggagccggtagctgcaaatatgggcgtggttcttccagatgagggcttccttcagggccttcgtgacctctgcgataaaaataacgcgcttctgatctttgacgaggtcatcacaggcttccgccttgcctttggcggagcggctgaatactttggcgtaaaaccggatatggtcacttacggcaagatcatcggcgcaggaatgccggtaggagcttatggcggaagaaaagaaattatggaaatggtttctccttcaggcccggtatatcaggcaggcaccttaagcggaaatccggtggcaatggcagcaggccttacccagctgaaatatctctatgctcatccggaggtttatacaggacttgagaaaaaaggaactctcctttatgagggaatgaaagaccttgcagaaaaagcaggacttatctgtcatctgaaccatatttcttctcttggaagtattttctttacaggagaaaaggtctgcgattatacttctgcaaaaacctctgacacaaaagcctttgcgaattatttcctgtccatgctgaagggcggcattcatctggctccctcccagtttgaggcaatgttcttatctgacgcgcattcagaggatgtgattcatgagacactgaaggtattttcagaggttctggaaaagggaaatttatatgaataaatctacattcggaaaactttttacagtgacaacctggggagaatcccatggaaaagctctgggggcagtggtggacggatgtccggcagggcttgaactggatgaaagccacatccagaaataccttaaccggcgtaaacccggacagagccgttataccacagccagaaaagaaggggatcaggtggaaattttatccggagtatttgaaggaaagacaaccggaactcctatttctctcatggtaagaaatatggatcagagatccggggattacggaaatattgcttactcttaccgtccgggacatgcagattttacctttgattccaaatatggattccgggattaccggggcggcgggcgttcctccggaagagaaacccttggaagagtggcggcgggagcagttgccataaagcttctggaagctctgggtatttctttctgtacctacacaaaagctatcggaccggcagagattacagaatttcatccggaagaaattgaaaacaatgccttttatatgccggataaaaaggcagcagaaaaggcaggcgcttatctggaacagtgtatgaaggaacaggacagcgcaggcgggatcatcgagtgccgcatcaagggagttcccccaggacttggaacaccggtgtttgaaaagctggacgccatgcttgcccaggctgttatgtccattggtgcggtaaaaggcgtggagatcggagaagggttccatgtggctcagatgaggggatctcaggacaatgacggatttgcggcctctgaaaaagggattgtcaaaacctccaaccatgcaggggggatcatgggcggcatcagtgacggaagcgagatccttctgcgggcggctgttaaaccgactccctctgtaagtcagccgcaggcaaccgtaacagacaaaggagaaaatatttctctggagatccacggccgtcacgatccggtgatcgtgccccgggcagtggttgtggtagaggccatgtgcgctcttaccattgcagacgctcttcttggcaatatgtgcgcaagactggataaagtgcaggaattttacaaaaaataaaacgcacaatattagacaaatattcccacagtgaaacattttctttaaaatcgaaacctcctataataatcttaacgattatgtatgggaggtttttttatgcagtacgggcattttgataatgaaaaaagagaatatgtcattgaccgggtcgatcttccggtatcctggaccaattatctgggagtgaacgatatgtgtgctgtggtcaatcatacagcaggagggtatattttttatcagtcgccggaatatcacaggatcacaaggtttcgtgggaatggggtgcccatggatcggccgggacattatgtgtatctgagagatgatgaaagcggagactattggagtatttcctggcagcctgtgggaaaaccgctggatcaggcaaaatatacctgccgacacggtatgtcctattccgtatatgaatgtgagtacagcggaatccaggcttctcagactctttctgttgccatggatgatcctgtggagatctgggatataaaaattaaaaataccggagaaaaacagagaagtatcagtgtattttcttatctggaattttcctttcatcagattgaaatggataacaaaaattttcagatgagtctgtatgcggcaggctcctcttataaagatggcgtgatcgagcacgaccttttttatgaagagtttggctatcagtatttcacagcaagctttgttccggacagttatgactgtgtccgtgacagattcctgggagcttaccgcacagaaagtaatcctgcaggagtagaaaagggaagattaagcggaagcagtgaactgggaggaaaccactgcggcgctcttcacaaaaaactggtgttgaatcccggggaagaggttcgggttttctttttcctaggagaaggcaagcgggaggaaggggctcgcatccgggaaaaatattcatctcctgaaaaagtggatagggtatatgcagaactttatgatttctgggaaaaaaagcgtcagaagcttcagatcatgactcccaatgaggggatgaataccatgatcaatatttggactctgtaccaggcagagattaatattatgttttccagattcgcttcctttattgaggttggcgggcgcacagggcttggataccgggatacagcccaggattctatgactgttcctcattccaacccggaaaaatgcagacagaggatagtagagcttcttcgggggcttgtaagtgaaggctacgggcttcatctgtttcagccggaatggtttgcacccggagaaaagccaaagccgtttaaatctccgaccgttgttccggaaccaaagcggtctgatatgatccatggtcttgaggatacctgctcagacgatgccctgtggctggttgcttcaatcaatacctatatcaaagagactggagaatttgacttcctggatcaggtgatcacttatgcagatcgcggggaaggaaccgtttatgagcatatgaaaaaaatccttgatttttcagataagcaaaccggacctcacggaatctgtaaaggtctccgggccgactggaacgactgtctgaatttaggcggcggagaaagtgccatggtctcgttccttcattactgggctgttcagaattttctggagcttgcacgatacagggaagaaaaagaggatattgagaaatataccgccatggcggaaagaatcaaaacagcctgtgacagggaactgtgggatcgggaatggtatatccgaggaataacccgaaacggcagaaaaatcggcagagaagcggacaaagaaggcaggatacatctggaatccaatgcctgggcagtgctctcccaggctgctcctgcagacaaaggaaaaaaggcaatggacagtatttataaagaactgtttacgccttacggaattatgcttaacgggcctgcctatcgcacgccggatgacgatatcgggtttgttaccagagtgtatccggggctgaaagaaaatgcatcgattttcagccatcccaatccatgggcctgggcggcagagtgcgttctgggaagaggagacagggcaatggagttttacgatgctctctgtccttattatcagaatgacaaaattgaaatacgggaatcagaaccttattcctattgtcagtttgtagtgggaaaagatcatacagccttcggacggtcccgtcatccttttatgacaggaacaggcggatgggcctattattccgcaacccggtatatgcttggtatccggccggggctgaaagaactgcagatcgatccctgtattccggaagaatgggaagagttttgcgtaaaaagagactggagaggcgccgtatatgatatccgggtggaaaatcctcgtcatgtttcaaaaggggtaagggaaatttatcttgatgaaaagaaagtttcatgtattccggcacagccggaaggaagctgtcacaaagtacgtgtggtaatggggtggtagtgtcaaataatctatgaaaaacagagctaaagaaaaaggctcaaatgaaccttgaaaattgcagatatttattccgataagctctccgagggctcagggcgttgccctgagaacctacaagggaccagtcccttgacccattttcgggcattgcccgaatctatcctcgccggaaggcaggaaaagggtgcagttgccccttttctgctggacaggatcatccgggaactttttgtcaacagactttcgcggcatatcctcacagtcggcatagccgtctgttgtggtattccacggttctattgacaaccgttccgctccggtgcagcagtcccgtttttctgtatattcagaatggtctgttgtccaaggaagatcagaagctgccacttgcctggcatgttatccgctccctggagcatgtctacctggttgagtactttatatcccgtatgtttatgtggtcgcaggaagttatagtaagccacccagagagccaggtcatagttggcaccgtcgatgttatcaaatccgttcgtgctgcggtaagaagccttgtacgtgcggttcagccgttcaatcatctgtttgaaagggcggtgttctttagaaacagcatcgtcgttggtaagtccaagaacctgggtaacggtgaaggtaaagtctttaccaaacttttttgcgaattccattgcagcaagaggatatgcactgtaaccgtccgcaacaaatttaaagttttccgggagttttgcaagcccatggaaagccatacgcatggcgaggatgcagggaccaaccccacggttatcggatacctgatagccgagaatggaacgtgtggcggcgttcatgatcagccagacgtaagttttgatgccgcggatcttgatataggtttcatcagcagtgaagacatcccctttctcgtaaggatactggtcgacaaagggcttgatacagatggcagcggttttgcagtagttagcgatctgctggtgggaaatgctgatgttatacaggtcttttaaagcttgtgacgtcttgcgcagggaaagccccagattgacgtgcagtgtcaggcataaggacatgacatgggcattgtgtttgttgaatttaagggaagaggcatttttaggcagggtatttaagcccatgctgaaaaaatccatcgtgaactcacggtagatgtaatggagcttatatttatttttaccataatcctctgcgagatctgccttgtcaacttttttgaggttgtgaaggtagtaaggacattcgggattgacgcatttatggacaatgaagtgtttcctgtcctttttgggaaccagggtgttgccgcaatgaggacatcgcagctttacggaagagaacctgctttcatcaggagaaaatctggcatcacagattttacacaggagttgtcctttggaaccgttattccggtagaggaagggtttgggagcatcacagcgtgggcaggtgcaggaatctggaatgtcacactctgaccggcggctgatcgggcggatctttttaccataacgcttttcgtagtaagggatgagttctttgtaagtccagtcctgacggaaatccgtgatcagagggagtgaatcaatcttgaacttttgatatttgggagagtgggaatcatcgaaggcccactgcttgagagggatatatctgcagataaaatttaaaagccagcagatttgttgatgttggtattgaattagctgaagtaaataaagtataatgttcatgagcattggctcctttcggggatgttggtttggcgattgacattataccagaaaagggaggtcaatgctctttttatttgtaaacctcctgtaattcaaggttttaaaggattttagaacaataaaaacagatagtttttgacactaccgtgattattaaagggggcataaaaatgaataaaaagaaaaaaggctcccttcagacagggctgatctatataatcctgatcgtctgggcattgactaccatctatccgatcctgtgggtgatcataaattcctttaaggacaagaagcatattatgtcagatgcgttttcgcttcctttcggagacttgtttacactgggaaattatgcggaagcattcgaaaaggttgacattttaagcgcttacaggaacagcataattatttccggagcagttgcagttcttgtaatattgatggcgggtatggcgtcctttgccctggtgagatatcgtttccgtctgaataaaactctttacagtctggtgatcgcggcaatgatgtttcctgtattttctaccatcataccggttttccggatggagtatggatgggggctggcaggatccggaaatgtatggctttcactgatttcagtaattcttcctcagacagcaggaaatctggcatttgccatggtggtgcttaccggatatatgaaagggctgcctattgaactggaagaggcggcgtttatggaaggctgcaatgcatatcagattttctttaaggtgatcatgcctcttacaaaaccgtcctttgcaaccgtgggaattttcagctttctgtggagctacaatgatctgtttacccagcagtttttcctgcgcaacaaagaagaatgggcgatcacaagacttcttctggaaatctcctccagggagggaacgaattacggcctgatggcagctgtggtgacactggttgtggtaccgcttttgatcgtttatgtgtgcctgcagaaatacattattaagggaatgactgccggagcagtaaaaggatgacagaaattcgcagttcagacatcttgatcagaagatgtctgtttctgcttcctttatgaaaaaatatcgtgtacaataaccataagaaaagatgaaaaaacggggggagcaagtatgtaccgtgtagtgatcgttgatgatgaaccgattattgtggaagggatttccagactggtaccctggaagaaatatgagtgcagtgtctgcgcctgcgcatacagcggaaaggaaggtctggaagtcgtgcgcagggaaaaaccggatatgattttttcagatatcagcatgccgggacttgacggaatgaaaatgatcgccggactgaaatcagagtttccggatatgcagatcagtattctgaccggattccgggattttgattattgtcaggaagccatccggcttggagtgaccagatttcttctgaagccttcaaaactggaggaattggaagaggcgctctcagttatgacatctaatttaaaagaacgtaatattcttccggaagattcggaacatgaggaaaatgcagcgggaagctttattgtacgcaacgccctgaaatacatggaagatcattacagtgaaaagctgaccctgagcaaagttgcagaggaaacctttgtaagtcagtggcatttaagcaagcttctgaaccgccaggaggaaaagaacttttcggagattctgaaccagatccgggtggaacatgcaaaagaactgatgaaagaaaaggcttaccggattgcggatatcgcggagttggtaggatttacggatgtggctcatttttccagagtgtttaaaaagctggaaggcatttcagcaaacgaatacagaaataccagaatttctctctccgaataaaagttgtcagtaaaaatattgcaaaaaatcataagaaaaaatatttgttcctgttgtagcagacaataaaaaggattataataagcatgattttttttggagccgaacaaggcccggacaggagcagacatgaattacgaagaagcaagaaactatctggatcaggtatcaaaaggcggaagcgtacttggtcttgataatatgagagaacttttaaacagactgagaaaccctcaggacaggctgaaatttattcatattgcaggaaccaatggaaaaggttctgttctggcgtatctttctaccattcttatagaagcgggataccgcacaggaagatatatttctccggtacttttttcctaccgggaaaaaatccaggtggatgaaaaaatgatcggacgggaagatctggcccgccttacagctgcagtaaaagaagcggcagaagatatgaaaaaaacacacacaggagagcctacgatttttgaagtggagacagctctggcctttctttattttgcagaacagaactgtgacattgttgtattggaaacaggacttggcggagccttggacgcaacgaacgtaatcactacttctgtgctggaggtgatcgcttctgtcagtatggatcatatggatttcctgggagatacactggataaaattgcgctgcagaaagcagggatcattaagcctcatacccgggtggtgtctgctttgcagaagccggaggcgatgaaagtaattgaagaaacctgcaggaaacaggaatgtgttttgcacacagcagatcccggccaggtgacagatgtctctcacagctatgacagacagaagttttcctataagcagtggaaggatatggaaatttctctgatgggaagctatcagcttacaaacgcagcccttgctctggaagcagtggattcccttagaaatctcggataccggcttgaggatcaggcagtatatcaggggatgaaaagagctgtgtggagaggacgttttactgtgatctccagagaaccggtaattgttatggacggcgctcacaacccggctgcggcggaagaactgagaaaatccctggagctttattttccggacaaaaagcttttttatattttcggaatgtttcaggacaaagattatgaaaaggtgacagagatcacagcaccctttgcagatcatattattacagtggaaaccccggataatcccagggcgctttctgcaaaaaaattaaaggctgaagtagaaaaaataaatccttctgtggaggcggcggaaagtatccggtccgcagtgaggaagactatggaacaggctcaggaagaggatgtgatcgtaattttcggttccctgtcctttttgggagaggcagagcttgcagtgtccagatacaaaaaagaagaggaaatataaaaagaatcccggcatgattcctgcggcacaggaattatgaccgggatatttgattttatctgagaaaaagttttaaaagtttttcggaagatttccggtagggctgatagcggacaggaagatccatccaggtttttttgtccactatacttttataatgggtaaaagtctcgaagcctgctttgccgtgataggaacccattccgctttctccgaatccgccgaatcccatctgactggtagcaagatgaatcacaacatcattgatgcagcctcctccgaagctgcagctttttgttgctttttctgcggctttcctgttttctgtaaaaatatacagagccagagggtgaggcatggagttgatacgggaaattgcctcatccagacagtcgtaagttaagaccggaagcacaggaccaaaaatttcttcctgcataatgggatcgtcaaaggaaacttcatccataagggttggagcaattctgagacggtcagagtcatattctccgccaaatactgtttttgacggatctataagagatacgatccgatgaaaatgcttctggttgatgatctttccataatcgggattactgagaggaaattcggtaaactgtttccggatctgtttttttatttcggaaatcagagaatcctttattgtgcggtcacaataaatataatcaggggccacgcaggtctgcccgcagttcagaaacttaccaaacacaattcttttggcagccagtttcagattcgctgttttttccacaatacaggggctttttcctccaagctctaaagtgaccggggtgagaaaatgagaagcctttgccatgacctcttttcccacatgctggcttccggtaaaaaagatataatcaaaatgctcatttaaaagacaggtgttttcttttcgtccgcctgtgacaacggttgcataaaaaggcggaaaaacctcgcagataatcctgctgacgatttccgctgtagcgggagcataggcgcttggcttgacaatgaccgtatttcctgccgcaatggcatccaccagtggcgtcaggctcagaagaaacggataattccagggactcataataagcacgactccgtaaggggagggagctacatagcttctggaggcaaactgggaaaggggagtgggaacagctttttcctttgaaaattcacggatatgtccaagcatgtaccggagctcgtcaagcaccagaccggtttcgcacatgtagctttcaaacctgcttttgccaagatcatgcttcagagcgctgcgaatttcctcctgatatttcaggatacagcagcgaagccttttcagcatgtggatccgcgtttttacaggaagagtcctgcccttataaaaaaatgctctctgctgtcggatcagttttttgatctcaagttcgttcataatcgccctcctgcctgaacataatgcctgaaattatggttttaactatatcagcaggggggaaaggtgtcaagcggttacagtattacaggaaagatatgatataatcaggttactgttcatgatcttcacagcaacctggtcaaaatgtatttcaaatcaccatcggtgatggcattttgccctgtatgtctcgggattttgtcatatacatgccaaaacacctggcgggatggtggtctgtgagcagtgactagtataacgaatattaaataattgctatatcaaacggatgccgcttcctcttcactgatttcatccattttatatttccagtgataaatcacaggttcacgatttacttcatcaaaatacctgtaaattcgctcttccaattcctctttggtattgacacggattccacgaagcatctgccgggtcatcttactgaaaaaactttcaatcatgtttaaccatgagccatgtttcggagtaaacacaaatttaaaacgtccctttggcagcgtatccagaaagcgccgtgtttctttggaagtatgcgcggaatgattatccaggatgatccggattgtatcctgtgatggatattttttgtccagtatctttaaaaactcaataaaatcagaactcttgtgagtctcacttactaacgggatggcttctcctgtaagcagatcaatgcctgccagcaaagagagcgttccaagacgtttgtattctgcatcacgatatacctctccgtgttccggtgtcgggcgtaaatccggtgcagtattggagattgcctgaatacccggtttctcatcataggacaccgtaatcgtcaatttataatcgtctggaacaatgagatcaccattctcatcaaactgcatttcaatctgtttgtagaccagcaggacttcatgcatttttgattcaaaatcaggatccctcttttcgcagtaatatttgattttaaagggtttcatatcctgttccctgaggaatttctggatataaggtttcgtaactgttgaaagtcttggatatcccgcctcctctgcatgtttctgaatgtatttatggagagaagccaatgtccacagttcctgcgcataaccgagttctgccggtctctgacacgcaatactgatcatccatgccttcgcatcgtcggtgatttcggatggacgtccaggacgctgaacatcaaacagtgcagcatccacaccgcctttatgaaacttcgaaacacaaaggcgtaccgtggcagtgctgattgcaagtttatcagcaatttcctggaatgtcattccatcggctttatataaaagaatcctggcacgatccacgacttgtgcctgaatggttctcttttttgataatgatttaaggtaattcctgtcttcatctgacagaggaagatatgtttttctcatagcgatcatcctttctttgataacactattttaccatacatcatctcaaaaatatatagcataaatttaatttattctatactagtcagattacttatgaaatgtcagggggtaaaaaattgaaggtaattgcatgtgtggatgacagaaacgggatgctttttaatcacagaagacagagcagagatcaggctgtgacagaaaagatccaggagatctgccagggaaaaatactctggatgaatgagtattctttttctttatatggaaacctggaaggcgtaacagtacggtgtgacaaggattttctgattcaggctgatacaggggagtttgcactgacagaaacagaggatccggtactgtacagtgacaaaacagaagaactgattctgttttgctggaaccgtacctatcctgcacagctttttatgacgctggacctgtcaggatggaaacaggtggaagagctggagtttgaaggaaattctcacaaaaaaataacgttaaaaaaatatgttccatatataaaaagcagcaaaaataaaacaggaattttaaatatttttccgaatatgatatacggtatgaatttttaaattgtggaaaattatgtaaaacagcataagaatatagaatttttagaatattatgtagaattttgttgcttaatagacggcttcatgttaaaataacaccatatactatccacaatgattcttacagaattataaaaggtgagagggggatttttatgaatcgaagcagaaagataatgaaaaaactgaccgcggcagcggcggcatcagcgctggttttatctggtacaagccaggtttttgctgcttcctataaggagacagaaaaagcagctctggataagctggttgcaggtttttccgcatattgggatgcagttatggcacagtatgaaaagggacaggaaacaggctttaacgcaaagatgaaactgacagtggaagaaaccggtaaagcagttctcggcgctatggtgggaatggatttttcctggctgaatactgtgactatggatatgacggaaatcataaaagacggcaaagaagcgataaatgcagatattcttttaaacgatgcacctgtgggcaccatgaatatctgtatggatctggcaaatatgacggaatatttccagattccggagctttctcagaattatatggcaattccattgattccttccatggaagagacaattgcagatgaaacaggggcaatgtccgaagaggatatcgcggcatatcaggcctatatggaagaatatcaggcttccatggaaacttatttaaagattgtttctgatatgacaaccgttcttccggacaccaaaacgctcagtactctgcttgatcgttatggaaatatcctgattgaaaatttcggagacgagacagttacggaagaagctctttctgtagagggtgtcagcgaggactgcaccgtttatgaagaaattcttacagaacaggaagtgctttccattttaagggaagtcctgactgctgcaaaagaagatcaggagctgaaaggccttctggatatgtggtcagaggccggaggcggagaagacctttatgctcagcttgtggcaggtgcggacagcgcgctggcagaccttccggaggaaggctccgaggagatcaatccggaggctgcaatgtttaattcaaaaatctggacaaatgcagaaggaaagattgtaggacgtgaatttggctttacagatgagacaggaacagaaagctatccgctgatttcctggaagaatccgtcagcagacggaaattcagcactgtattttgagctctggcttgacaccagttccattacgcttaccggttccggacagtccggtgatcagggactgacaggagaatatgttcttgcttttgacggagtaaaaactgttggaatcggtgtaaataatctgaaatcagatacagaagctccgggatatatgaacggttcctttaatttctcgcttctggatacaggaacagaggaggaacccaatccgctggcagcctttggactgactgcaaatattatttctgatgcagcagcacagacctcacaggtagatctttcacttacaagttcaggcgctcctgttgtaacattgtcagtaacaggcggctatgaagcgtcaggagaaagtgttgaaatgccggatcaggcagttcttgatgcagctctcagtgtagaaagtgaagaagatatgactgcatatgcggaaggactggactggacaacggttcttacgaatttaggcgcagcaggcgttccggaagaactgattaatcagttacagatgatgcttacagctcctgatgcggcagcagcagaggtaccggagacagtgactgaggaatcagccgcataatagaaagcagaataacagaaatgaaaaaggatatcctttctgtcagatgacaaatctgaaggggatatccttttttatcattttattgttccagtctgtgactgacccggcggaaagtaaggttaaatacaattcccttggcgatagaggtcagagtcagagcccaccagataccggtcagaccaagtgaggtacaggtaaggacaagcgccaggggaatgcgggaaccggtaagcaggatgctgatgatactgcagatttttgttttcccaagaccggacagtgctccgatggtaagcatttccacgcagaggaaggcttcgcccagaccgataatgatcatatatccgaccgcaatttccagaacctccggttcgtagaaaaacagagaagagatctgccgtgggaacaggacaaaaactgcggttacaatgacaccccaggtaatcatgatcttcatggacaccttatatccctttcgtatccggtctgtttttcctgcgccataattctgtgctacaaaagagttcagggctgtggcaaaaccgtctgcagtattccaggagatagactcaatctgtcctcccactctctgggtggcaatggctccgggtccaaatgcagaaaccatacgggtaagcaccatggagatcatacagtaaagagttccctgaagagcagtgggacctccgattctgcagatagaatgatagatggtgcgatcctgtatggagaacagatgcacatggcggagaacattatcctgattttttttctggaaaacccctgcgatcatcacagccataacaataaactgagcagtaacagttgcaattgcagcgccggcaacctccagacggggacaggggccgatacccagaaccagaagcggatccaggatcatattcatgaccagcccgatcagattggcgataaacggtgtttttgaatttccctgagctgtataaattccggtaagggtataattaaggtaggaaaaaataaccagtccacaggtgatcttcatataaatttccgcatgcgcataggtctgcgggtctcccagatgaaaaaaatccagaagcggcctggtaaagatcaggcacactgcagaaaacaaaaaggcaaaaatacaggtaagctgaagggccgcagaggcgtaatccctggctgcctttgtatctccccgtccgcagctttgggccacattgacctgaccgcccatgcgggccagagagcagagcccctgggaaagccatacatacatgccccccattcccacacctgccactgccttggaaccaagaacaccgatccatgccatatcggtgatgttgtaggctgttcccagaaaggaggaagccataataggcaaagccagctttgccagagtttgtacaataggaccattggtaaggtctgtctgttgttttttgttcataatcatctctttcctgtctgtaaaattacattatgaacttatcttaatgaattagggaacagaatgcaacaggaattttctgattatcaggaatatatttactcataatgttcctccttctactgctgtcagaaggagagataatcataacatttctgtatgaaagagtaaatatcaactgtgcgcaggtaaattccaccgcataaggggcatgcggtggaatttaaaatttcattttaggcattataggtattaacaaaaagcatattacggatatgcagaaggatatggtatactttttaagtaaggtatcatattcaaagaaaacaaaaaaggaatcaggaggtcagtaaatgggttgtcttggaaacttgttgtggtttatattcggaggagcgatcagcgcccttagctggtgcgtggcaggatgtctctggtgcattactgttgtaggtattcccataggtatgcagtgctttaagtttgcttcactcagttgttttccctttgggaaagaagtgcgttacggcggaggagcagtatcccttcttgtgaacattatatggctgatcgtttccggtctgcctctggcgattgaacacgcggttatgggcgtgatcctctgtgtgacagttattggaatccccttcggacttcagcagtttaagcttgccaagcttgcgctgatgccgtttggagcagagatatattaaaaagtgaaggaagagaaaacagcagcagtcctgtcaggatgaaaataaatttgaaattagggaaggtttgatgatgtgcgggttgaaacttgatgtaggcggtataaaaattaaattacagataaatgattataagccgactagtaagaagaaatctgcaaacagatttaaggcaggtgaggacgacggaaaagaaattatcagaaatgactttggaggaattgtggcagttatttcctatatgtttaacagaacatcaatcctgttggcaagaatggtattcagaggaagaaaaactattgaaaagaaccctttcttcaaatgaaagaataagccatattggaagtactgcaactccttctatttgggcaaagcccattgtagatattcttgtggaaattccaaaagaaagaaatttgcttgaatataaggttccgataataaataatggttatatttgtatgtcgaaaagtgaaaatggactatcttttaataaaggatatacagagaagggatttgctgagcgagtgttccatttgcatttgagatatgcgggcaataataatgaattatattttagagactatcttattgagcatccagacactgcaagggaatacgaaaaattgaagttgaaattatggaaggaatatgagtataacagggatggttatacaaatgcaaaaacagaatttgtaaagcaatatacagctaaagcaagagctctgtatgagaataggtattaacaattttgacgaatcagaagaggtgacaaaatgataaatgatttaatgtatatagagctgaaaacaggatattcggatgatggtccgggatggatcgggtatgtaaaaacttcaaaaactaagagtaccatttattttaatgaccatgcttttcaaaaatataatggtggctattcaaattatacagatattgaaaatggtgatgagtactggatctccggtttaaaaaagaaagagagcaaccgccattgggcaggacgcggaaaaatcatgattgaccgcagagctgtggatacgtatctttccctgatcggagaagagaaattaccgttaaatctgtttgaaataattgatatagaagacagattccctgttgaacgagtgaacagattattaaatgacaggagataaaattccggtgaaagaataactgatagaacaaagtaagaatgttttctgaagaatcggtcttttataaatgggaagaaatattttttatgacaatcattcctggtaagaaggaatagtcgctgcatttgtttcgattgcttatattgaatttgtctgttctgtataaaaatggggatttgaaaatgaaaatattgatttttcatgtgataagtactattgtgatcacaatttgtatggtatcgacctttttatattttataaagaaaaggaaaaaattctccaagactttaagtaataaagaggatttttttctgaaaattggtacagggattcttttagtggtaatattttttaaaatgttcattcctgctattttagatataccatattatctcaaaatgattttaaggttgtttcgggatacgccagagataatgctaatggatcaggaaatattagacatgttaccataataaatgaaaaagataaacaagaaatatatgtagagttttcttattctgatggcgtaaacaaaggtgattatctaaaagttaaatatttacctcatacgaaatatggaatacttttaaacaggaagtaaagggatcagaccggtaaatttgaaagaagttatatatgaaacatcagaaaatgcaggctggtataaaggaagataaattgatattgcttcagtcttgtacagttatgcggaatataacctgatactaaaagttcaaaagcaatagatacgtttgaagagttttgaagtttctggatttcactttcagctgttaatttcctgacttcataatatctttcagcaagataagagcaaagagtacagacagtctccattttatccaggacaatctgtactctttcttattggaaaacactgcaggaaaaaatttctattttctcttatggtttttctcatggatggtttttcattattctgaagaaaaaatattccgcttattcctgcagggaatcctctgatccagaatcactgtcagacagatcagcagattcctgactggattcaccgatcggttcagaggtttcggcaggcgtgatccaggagcttctttcctgaattttggccaggatccggtccgcctcgtcaccctgggcaggagtgggctgatagttgttataatcatattcagaggaaatggagcaggggatcacattggtgacattgtcagcttttactccgtttttatctaccgtaaaggtctgctggaagatcatggtgtccatatcgcttgggtaggaatttccgccaaagcagaaatttcccagactgtaaacaatgttcttgcctttgtattcttcaattccctgaagcacatggggatgatgaccgcagacaagatccgcgccttcatcaatggcaagtcttcccagtgtcatctggttgctgtcaggaacctcttccttttcatttccccagtggaagatcacaatggtgatcacagcgccctcttcttttactttggcaatattctgttttaactgttcttcccggtccagatgatctttcagctcatagattcccacaagtcctactttgatgcccttgacatctataacagccgtttcgtcatacccgaaatgagtgatccccttctgatcaagggcggtcagggtatcggtaaagctctgttctccataatcatggctgtgattattggctgtatttaccgcttccacagaaccggcagtgagtatgtctgcatattcagccggagctttaaaggcaaattgtttttcttcccgttcttcggagtctgtaagagttccctcaaagtttgcaatcgtcagatcgtcttcagaaaaaatattttttacattagagaaaaagtaatcagcgccatagctttcgtaataggcattaagactggtatcatagtcaaaagactcatctgtgccaagggtgcagtcgccaaccacactgacagccagtgaaaccggattctccggaagatctgggtttttgtcagtcgcttcggtgttttcatcaccggaagcagtgtctttgtcactcacttttttggcagaattatttttcccctctgtctgagtgttctgtgaggaggctgattctgcttttttgtctccgcagcttcggattacaaaagaaataacaagaagaaaaagcagaagtacagcgcctgctgtcataagaaagatttttttctgcctttctctgtaataacgggatttgcggctgatacgtcgtttgtgtgcggctgcagagcgtgaacggcttctgtttccgctgtgagcggaagacgctctggagcgctgagaggatgatttttttgcgccccgggaattggctccggtttcctgcccggtccgggaactttgcctggaagagtccggcttctggtttttggatgatggattcatacgcagctcctttgtcattggtaaaaagtaagcagacagccggatttctgattaaaaattccggacatcggcaattaataaaagtataggtattttttggattttcgtcaacagattttctctttttgtccagaaggttttctgctataatggggatgtccggaacatgcgccggaatatataaatatggtgtcgggattattttgggcagcagttatggactgttttctgcctcagatatcatccggataaatacagaagatggagaaaaaatatgttatatattggaaatcatacaacctcatccaaaggttatgaaaaaatggctcagcagatgatcgcaaacggaggaaatacctttgcgttttttacaagaaatccaagaggaggcaatgccaaggctattgacgagacagatgtgaagaagtttctttcacttgccggggacaatggatttggaaaaatcgtggctcatgcgccttatactatgaactgctgcgcagctaaggaaaatctcagagaatttgccagaaatactatggcggacgacctgaaacgaatggaatatacgccgggaaattattataattttcatcccggaagtcatgtgggacagggagcagaaacaggaattcagaagattgcggagatcttaaatgaagttcttactgaagagcagaccacaacggttcttctggaaacaatggccggtaaaggctctgaagtcggaagggattttcaggagcttcggcgtatcctggatctggtggaaaaagaccataaaatgggaatctgcctggatacctgccatgtgtgggacggaggatatgatattgtcaatgatctggacggagttctgacagagtttgaccaggtgatcggtctggagcgtttaaaggcggttcacctgaatgacagtatgaatggacttggaagccataaagaccgccatgcaaagatcggagaggggcagattggactggaagcgctggtgcgggttatccggcatccggctttaaaagagattccgttcattctggaaactcccaatgatgatgagggttggacaagagaaatcgctcttcttcgagaagaatatgaaaagtaaacagctgtaaaaatacagaagaaacattgttcaaatatttatatgcagcttttactgtgtgatgtatcgcattataaaacaaagctcccctgtctgatgccagttaagaagcatttcagcaggggagtttttacttagaactttactacgttttttagttttttattatcgcggaaatctgatgcattctgaagggtagtctcggctatatttgtgagagcctcttctgtaaaaaatccctgatgggaagtcattgccacattggggaaagacagaagacgctgaatggtggagctttgcagaatcctttcagacatatcttcgtaaacaagctcagattcttcttcgtatacgtcaagacctaccgcataaaatttatgatcccggattcctgagatcagatcttctgttttgatcaggccgcctctggaagtattaaccagaatcacaccgtccttcatttttgcaatagaagaggcattgatcagatggtgggtttcttcggtgagagggcagtgaaggctgatcagatcactggtacttaaaagctcgtccagagatacatattccagaaaatccagttcgttgctgggataaaggtcataagcaatgacgcgcataccaaatccccggcagatccttgccatggcaagtccgatctttccggttcctacgattccggctgttttctgataaagattaacgcccataagtccgttgagagcaaaattattttccctgcatttaatataagccttgtgggtgtggcgattggctgtaagcgcaagagccatggcatgctctgcaaccgcttcaggagaatagccaggtacccggagaaccttgataccatattttgctgcagactgcagatccacattgttatacccggcgcagcgcatgaggatcagtttaatgccctgagcatgaagctcattgatcacaggagtgccgatatcagcattgacaaaagcgcagattccgtcatagccttttgccagagaggctgtttcttcataaagattggcttcaataaacttaaaagtaattcccggatatttcggggcgagcttatcaaaaaactgctgatcatagtcctttgcgccataaaataaaattttcataagaagctcctttctgagagtatgtactgaaagtatcagaattatagctgatatgatgctctgaaactgctgatgaaagaggaacatggaaacaggaacatttacagaaaaacagctcctgaatataaatactgtgtgtacaagttaatgaaactatacctggatttttatggaaagtaaagagaaaacaaataaaattactgcgaaattactgtgaacaaagtgaataataaaaataaaaaagttttactgacttgaaattttaaattccagtgcatgattaaattccatatgggttttaatttttcaatttttaaaaaatttttactgctttgcagttgttatttttgaggacattgttataagagttaaaaataaataaagaactataaaagagcaaatattgaattttgcacaatagaatccgtgatgattttgtgcacttttttcaagtttgctcatttatggataataaattaataataagcagatgtagaattttgcatggtagaatccgtaatatgcggatgcaaggaaaacataaattttacaggtacattttaaaagacaaaataataaaaaatttgcaaaaggaagagaaaaaatggaagaattacagataacaggacttacagaaaaagattatgaaagcgtaaacaaagcttatcataagcttcatgaagagcatgtaaagggaagaccggatatttatacagatacccgggaacttctgacaaaggaggagtttcaggagattgtaaaaagcaaagagtacgtggctgtgggtgcaaaaaaacaggaagaactggctggctttgtgatcgcaaagagaaaggtgactccggaaaatcccatgctgaaaaagaatcatactttgtatattgacgcaatttatgtaatggaaaagttcagaaagcagggagtgggaagaagcctgtattcttacctggaagttctggcagaaaaagaaagccttcagagaatcgatcttaaggtatgggcttttaacgcaggggcagttgccttttatgaaagtctgggatttcaggtgcagagttttaacatggaaagaagattttagagggataaaatttttgtaaagatcctacgactattgattcagggattatgagttttgaacctcctggtggttggcagacaggcacctggaggttttttattattcttattaactataaatgagcaaatatcaaattttgcacaatagaatccgtaacacacagacataaagggaatattaagctttatatgtgcatcttataaagacaaattcgtgatgattttgtgtactttttcaaattgctcatttatagcttattaaaataaaaaatgccgaagtgcatattcattcaagtatacaccccggcatttactgtaaaacgttctcttacacaaaagaatagagatccttataaaaatcaggataggagatattaacgcattctccgccccggatattcatagttccctcacagattgttccggctactgcaaaggacatggcgatccggtgatccagatgggaatcaatgacagctccgtgaaggggcttcccgccgtgaatgatcattccgtcatctgttccctcaatgtctgcgcccattcgtttcaggttatccaccataaccgcaatccggtcagattcctttaccttcagctcctgagcgtcccggatcacggttgttccttctgcaaaggctgccataactgccagcatgggaatttcatcgatcagggtcgggatatctgctccttcaatgacggttcctttcagactgcttgtacggatcagaaggtcagccgtaggctccccgtcatgcttttcatttaaaagagtaaggtcagctcccatggcgcggcagattttaaggattcctgctctggtaggattaatgcctacatttttaagaagaatctcactgtctggagtcagaagacctgcggcaataaaataggcggcagatgaaatatctccgggaacagtgatttctcttgcctcaagaacaggctccggtttaatggaggctgtggtattttccgaagttatttcagcgccgaaataattcagcataatctcggtatggtttctggaaaggaaaggttccgttacactggtaataccatcgccgtacatacctgccagaagtacgcaggattttacctgagcggaagctaccggagaatcgtagtgaatggcatgaaggttttttccatgaatcataagcggagcgcatccgtttcccttctggcttgtgatgtctgctcccatgagggtaagaggagtaatgatccggttcatgggacgggtacggatagagtcgtctccgtcaagtctggaagaaaaatcctgacctgccaggattccggagatcagtctggtggtggttccgctgttacctacatcaagagtttctgttggggagatcagtccgtggagaccttttccccgcacaaggattccctctttggtgtgttcaatttcaattcccattttgcggaagcaggaaattgtagaaaggcagtcggcgccttccagaaagtgagagatttttgtggttccttttgcgagagcgccgaacatgactgccctgtgggaaatggatttatctccgggaacagtaagtgttccccgaagacctgtctgttttttgatttccatatcattacctaccgttcatatacaatataatttctttttttcagaagagcggcgccgcgcttcatagcgtcctcctcataaaattcaattttcagcacgccctgttcaaattcacggttgtggataatgccgatatttttgatgctgatattatccatggcaagaattgtagcaatagtggcaattccgcctgcttcatccacaatatcaagataaagaacatatgctttggtgatcagtccgcaggaggttacgtcaatagaatcacggtaatctctggaagcggcaaaaagctgataaagctggtctgcgtctttgttgtccacagagcagcggatctggatcagcatacggatatattcatccagaacagtggaaatattttttgtgttttccagacagatctgctgccacatgacaggagaggaggaggcaatgcgggtaatatcccggaaaccgcctgccgcaatggttttcatatattctgcatcgttgtcaagggagctgatcagatttaccagagaggaggcaatgatatggggaaggtggctgacacctgccgtgataaaatcatgctcttctgcagtgaggaccatgggtattgcccccagtgaatctacaagctctgaaaattcagttaatttatttaaagaaacctgtcctcccggtgtcaggatatagtaggcgttttccagaagatgatcggaagagttggaaaagcctgaccgttcggaacctgccatgggatggccgccgataaagcagtgatccatttccagcttttctacagcttcatggatcggtccttttacacttccggcatctgtgatgatgcagctgtcggaaatgacagttttcaggtatttcagatattctatgttatattcaacaggggcgcacagaaaaacatagtcgcagattttataacgttcgtcttccttttccagtacaccgtcaataacaccgctgtttaaagcggcggcaagagtttctttatgtctggcgtatgccaggatatggtaatccggatgaaatttgcggattgcttttgcaatagagcctccgatcagtccaaggccgataaaaccaatggttttcatatgttcaggtatcctttcccatgaaaaatatattcatattttaaaagataaggagaaaaaagtcaaatactgtagagaaaagtaaaaattcgtgaaattttcacattatttccgtaaaaaaagttgttaaaattatataaaatacttgaaaaagctgagaaattttagtaaaatatgaacatatcagacaaacagggaggtattacatatggacgtttatagaactgaccgaatcagaaatgtagtcctattaggtcacgggggctccggcaaaactacactggcagaggcaatggcatatcttgcgggaatgacaagccgcctgggaagagttgaggatggaaatacagtcagtgattttgataaagaggagattaagagacacttttctatttctgcatcattgattcctgttccgtgggataaggtgaaaatcaatgttcttgacactcctggatattttgattttgtgggagaggtagaagaagcagtcagcgcagcagatgcagccatcattgttgtttccggcaaggcgggggttcaggtgggaacacagaaagcatggaatctctgtgagaaatacaagcttccgcgtatgctctttgtaacagatatggatatggatgatgtcagctatcgtaaggtcgtggaagagctgacagagctttacggcaaaaagatcgcgcctcttcatttcccgatccgtgaagacggaaagtttgtgggctatgtaaatgttgtaaaacaggccggaagaaaatatatcgaccgaggcggcaagcaggaatgtgagattccggaatatctgaatgaatatctggaaaaatatcatgacattcttatggaatctgtggcagagacaagcgaagaatttatggatcgttattttgagggcgatgagttctctgtaacagaggtttctgcagctcttgcaacaaatgtacaggacggaagcattgttccggtatgcatgggcgctcccgtaagcttaagaggcgtatccaaccttctggatgatatctgcggatatttcccaagcccggataaacgttcctgcaacggaatttcccagaagacaaatgagatctttgaggcaaattatgattttgccaaagcgaaatccgcatatgtatggaaaaccattgttgacccgtttatcggcaaatattcctttatcaaggttgcttccggtgttatcaaatccgatgatacacttctcaatgtagaaaaaggagaggaagagcgcctgaataagctgtatgttctggaaggctccaagccttatgaggttccggaacttcatgcaggtgacatcggtgccattgccaagctgaacagcgtacagacaggcgacagccttgctaccaagactgcaccggttctttatccgaaggctgtgatctctactccttatacctgcaagagatataaagcagttaagaagggcgatgaggataaaatttctcaggctcttgcaaaaatgacaagtgaggataagactctccgtgcagaaaatgattctgccaacagacagacacttctttacggtatgggcgatcagcatcttgatattattgtaaataaactgaaagaccgttataaggttgacattgagctttccaaaccaaaggttccgttccgtgagacgatccgcaagaattctgatgtggaaggaaagcacaaaaaacagtccggcggacacggacagtatggtcatgttaaaatgcgttttgcaccttccggtgatctggaaacaccatatgagttcgagcaggtagttgtaggcggagctgttccgaagaactacttcccggcagtggaaaaaggacttcaggaatgtgttctgaaaggacctcttgcttcctatccggttgttggtgtgaaagcaactctttatgacggttcctatcatccggttgactcttcagagatggcatttaagatggctacgatccttgcgtttaagaaaggatttatggatgcttctccggttcttcttgagcccatcgtcagcatgaaggtaacggttccggataaatacaccggagacgttatgggcgatctgaacaagcgccgcggccgtgttctgggaatgaatccggatcatgatggaaatactgtaattgaggcagatatcccaatgcttgagatttacggatattccacagatcttcgttccatgacaggcggaagcggagacttctcctatgaatttgcccgctatgagcaggctccggcagatatccagaaaaaggagatcgaggcaagagcagccaaagatgacggagcagaggataaataaaaaataattccatgtcagatgatggggagagatattttaaggcacaggattaggtcctgtgccttgattatagagttaaaaattgtaagtattagatacattacgggttcagcagttcttctgatagctgaaagaaggtagccgataatatattatttcatttcttttctttaatcagttgataaatcaactttttctgattgtctgttaaataaatccactgagtaaataaatctaattgatccctattcaattgaacagtaaaattattatctgaaaaggttactttaataagcttaaaagagagcttccaatagttccttccggcatttttactccgaaattaactgctatagttgcgcctaccaccgcaaaggtttcctgttccggaatttcagccccgcctttcatagagggagagtaagccaggaagggaaccttttcacgggtatggtctgttcctgtgtaggtgggatcgttgccgtgatctgctgtgatgatcagaagatcgtcctttttcattaaatccagaagcctgccaaggtttacgtcaaatttctcaatttcccgggcatagccttcgggatctcttctgtgtccccagagagcatcaaaatccaccaggttcacgaagcagagaccgtggaaatctgtctgagcaatttcaagggtctgttccataccgtgtacagaactttttgacttgtgggagtcagtgattccctgaccgtcaaaaatatccctgatttttcctaccgagatcacatccagtccggaggccttcagcgcatccaaagctgttttgccaaagggcttcagcgcatagtcgtggcggttgctggtacgcttaaattcacctttctttttgcccgtataggggcgggcaatgacccgacctacccgccattcttccttcatagtcagttctctggcgatctcacagcagcgatacagctcatcaagaccaaaggtttcttcatttccgcagatctgcataacggaatccgcagaagtgtaaacgatcatatgacctgtggcaatttcttcttctgcaagttcatccaggatctcagttccgctggcgcttttattcccgatgactgtgcggccagttcgtttttcaagttccctgataagctccggaggaaagccggtttctgtgaaggttttgaaaggtctggtgacttccagccccatcatttcccagtgcccggtcatggtgtccttgccgttgcttttttcacagagctttccgtagtaagccagaggggcagaggcaggaggaacctgcttcaaaggggtaatgtttgcaagacccagcttctgcaaagtgggaatatggaaggagtctgcagtctgagaaatatgtcccagagtatttacacccacatctccgaaagccggggaatccggcatggctccaactcccagagaatccgcaacaatcacaaaaatacgtctgaatttttccatcatccatttacctcatttgataaaaataaaatagacttttaacgtttcaaacatctgtactatagttagtataatcctgtttttggggtttgccaagggattgtcagtaaaataactgtaaatgagcaaatttaaacagatgtacaaaagcctttctggtttgtctttgcaagatgtatatagagagtttaatgttttttatgtccgcacattacgggttttataatacttaatctggcatttgtccgtttacagcgtgttatcagttttatgacaggtttcctgcaggttgatttttttaacaaagattaattgagactccattgttttccggttggtgattttttataatacagtcaggaggtggagctgatgaaggaaatcaggctaggccgtgttctggtgggaaaccgtcataaacgtgggattacccaggatgaactggctgcatatttaggagtatccaaagctgctgtttccaaatgggaaactggtatgacatacccggacattacgctgctgccgcagcttgccgcatattttaatatcagtattgatgaacttatgggatatgaacctcagatggataaaatggaaatccggaaatgctattatctgcttgcagaagaattttcctctctttcctttgaggaggcactggaacattgccatgaaaagataaaaaaatattattcctgctatccgcttttgtttcatatgggtattttgctggtaaatcattttatgctggcaggaagtccggaaaaatcggagcagatactggaagaggcaagagagcttttcagccgtgtaaaaacagaagcagaggatccgaatcttggaaaagaggcgcttcagatggaagcgtactgcctgctgatcctgaaacggccggaagagatactggagctgttaggcgaggatgcgataataacaaatccggcagaaccggtgctggcttctgcctatcagcttctgggaaatgcttcggaagcggaacggattttgcagatcggcatatacaaagaggttgttgccctgtgtaatgtattattctcatatatgaatctctgcacaggaggagctgaggagtttgaggagatctgcagccggtttcttgcagttgcacaagcctttcagctggagaaacttcatccgggaatcatgcttcccggttatcttatgattgcgcagggatgggcagtgcggaaggaatgggaaaagacatttgagtttctggaaaaatatacagagctggcaataggagatatttatcctctgcagcttcacggagattctttttttcataaactggacagctggctggaagagtcgctgcctctgggcgttcagcctcccagaaatgtctccttaattcggcgcagtatgacgcaggctcttacagacagtccggcttttcaggagatttcagaagaattccgatttgggaagctggtatcccggctaaaaaagaatgaggaggaacagtagatggatgcgattgttttgcagggtctttccaaaacatatatgaatggaaaaagagcagtaaacaggatcagtttttctctgaagcagggagaggtatttggatttctcgggccaaacggggcaggaaaaacaacgactgtaaagcttcttacagggatgctggctccttctgagggagaaatcaggatactgggactgaatccggcagaagccccgaaaaaggtacacgctgtttccggggtagtaacggagcatgcgcagatgtacaacaatatgaccggaaagcagaatcttattttttatggttctgtgttcggaatggcaaaagcagaggcagataaaagagcggctttcctgctgaaacaactggaactggatgaagcgggagatcagaagctgtctacctattcgacaggtatgcgtcagagactttcccttgccagagctttgatccacagaccacagatcctttttcttgacgaacctacttccggacttgatccggaaagcgctcagaatgtgaatcagctgatcaggaagctggcagaggatgattatataacgatttttctctgcacacaccagcttcgatatgctcaggagatctgtacaagatatggactgatggctcagggaaggctgcttgccaccggcactctggatgaattgcgaaataaggtggcttccggtataagtcttgagatctgtggggatcacatgccggaggaactgggatttttaagaacaggagagtggcagtatgagagcagaatccggtccgacaaagagattcctgaccttgtccgtaaaatcgtaacaggcggcggagatatttactcggtcaatgtaaaaaaaccgtccctagaggatatttatttttcccttactgccagagaggaggcactgctatgaaacaaaaaatggctgctattatcagaaaagacttaagaaatatcacgaccaataaaaatctgtttctttcccttttgatcgttcccctggtttttaccattatttttccgtccattctcgtatgcgccatccattttatgccggatgacccggacattcagaagatgctggagcttctgccgatgtcccttcgctccggaaatatggagctggacctgatgggaatgattctgaattatattcttcctgtgttttttctgatcatacctgtaatggcggcgtccattatgtcagccagcgcatttgtaggagaaaaggaaaaacatactctggagactctgctttactgtcctttatctgtgaaacagatcttctgtgcaaaggtaatggcatccttttttctgagtatgctgatatcttttatttcttttctggcaatgcttctggtacttgaagcagagacactgtttctgatgggaagttttctgcttcccggaatcagctggtttgtgattttgtttttgatctcgccttctgtttccctgatcgcaattactttgatcgtgcggggttctgcaaaggctcagagtgtggaagagtcccagcagggcgctgtttttctggtgatcccgctgcttctgctggctgtgggacagtttatgggagtgcttcttgtaaacacatggattttgttgggattgggagcactatgcgctttggcggcaggacttcttctgaaaagatcaatgggacggttcagctatgaaatgctgctgaaataatgaaacagaaaatttgaaaaaaggaataaatgacaaacatggaatgaaacagacagaatgcggtacaggcataaaaagaagtatcagaatccaatcccgggatatgggtggatcattccgggtatgtggcagaggcctgcaaaaatattgcgtagctctgccatagtctgtctgttgaagcggcttatatgcttctgtgaattttgttgtctgttacagttgtctgtcagtatttacataaaaatggacaaaaaaagtatgatatttttgtgtaaaatatggaaactgaagattgtcctccaaaatatacaagatatgccttgacggaaacctggttatactatatattctaaacatgaaatatgagttgcacagaaataactgtgtggatttaaaaacaggaggatgattcatgagacaggaatgggcttcatttaacggaggcgtttggcaaaaagaaatcaacgtgcgtgatttcattcagaaaaactatacaccttatgagggagatgaatcctttctggcaggacctacaaaggccacaaacgatttatgggcacaggttatggagctgacagaggaagagcataaaaaaggcggtgtcctggatatggatactcatattatctccaccattacatcccatggaccgggatatctcaataaagaaaaagaaacaattgtaggatttcagacagataagccttttaagcgggcgcttcagccaaacggcggtatccgtatggcgatcaaagcctgcgaggacaacggctatcatgtggatccggaaattgtagatttttatacaaaatacagaaaaacacacaacgacggcgtattcgacgtatattcaccggaaatgcgagcctgccgttccagccatattattacagggcttccggatgcctatggacgcggccgtatcatcggtgattacagacgagtggctctctacggagtggatcgtctgatcgaggacaaagaggatcagaaggcaggaacacgaagtaatatgtacgaggacgtgatccggggccgagaggagctttctgaacagatcaaggcattaaaggagctgaaaaagctgggagagatctacggctttgatatttcaagaccggctcagaacgtgcaggaagccattcagtggctgtacttcggatacctggcagccattaaggagcagaacggcgcggcaatgtctcttggacgtacttccactttccttgacatttatgcagagcgtgaccttgcaaacggcacctttacagaggagcagatccaggaatttatcgatcactttattatgaagctccgtcttgtaaaatttgcaagaactccggagtacaacgcgctgttttccggagatcctacctgggtcacagaatccattgcaggtatgggaattgacggaagaagcatggtaacaaaaatgtcctaccgttacctccacacactttccaacctgggaccggcgccggaaccgaaccttactgttctgtggtctacaagacttcctcagaacttcaagcgtttctgcgcaaagacttccattgcatcctcatccattcagtatgagaatgatgacctgatgagagtgactcacggagacgactatgctattgcctgctgcgtatcttccatgcgtgtgggaaaagaaatgcagttcttcggagcccgcgcaaatcttgcaaaatgccttctctatgctattaacggcggtgtggatgagatcacaaagaagcaggtgggaccgaaataccgtcccatcacctctgaatatcttgattatgacgaggtaatggagcgttatgacgatatgagccgctggctgtctcacgtatatgtgaatactctgaatatcattcactacatgcatgacaaatactgctacgagcgccttcagatggctcttcatgacaaaaatgtaacacgctggtttgcaaccggtattgcaggtctttccgtaatcgcagactcactttctgccattaagtacgcaaaggtaaaaaccatccgtgacgaaaacggcattgttgtggactttgaggtagagggagattatccgaaatacggaaacgatgatgaccgcgtggatgagatcgcatacaagatcgtaaaagattttatgcattatgtgggaacaacccagacttatcgcggaggtattccgacaacctctatccttactattacttccaacgtagtatatggtaagaatacaggagcaacaccggacggacgtaaggccggagagccttttgccccgggggcaaaccccatgcacggaagagacagccgcggcgcagtagcgtccttaagctctgttgcaaagcttccgtttaaagaggcgcaggacggaatttccaataccttctccattattccgggagctctgggaaaagaggatagggtaatgctggattccatcagccttgacgatttaagcttttcactggaaccagactgcgcatgctgcgagccaaatctttccgtagacgaagcagaataattttaggtttactttgttcacagtagcctggtcaaaatacatccaaattacttcggtgatgatattttgtcctgtatatcccgggattttggaatatatttgccaaaacggcccgtgggacagtgatctgtgaacagcaactgattttacagaatttattcatataacaggaggaaataattatgaacatcagcgacgcacagattgacaacctggtaaacttacttgacggttatgcagaaaaaggcggccatcatctgaacgtaaatgtttttacaagagaaacccttctggatgcacaggcacatccggaaaaatatccgcagctgactgtccgtgtatccggctatgcggtaaacttcaataagctgacaaaagagcagcaggacgaggttatttccagaaccttccatgaaggaatgtaagcatatggcaaaggaatataaccataagggatatattcattctacagagagcttcgggaccgttgacggtcccggagttcgttttgtagtgtttttccagggctgtcccatgcgatgcctgtactgccataatccggatacctggaaaacgggcgaaggaaaggaaatgactgcagaggaaatcctggaagcctataagaagaatgaagttttttataaaaacggaggaatcacagccaccggcggggaaccgcttatgcagcttgattttctgacagaactttttcagaaggcaaaaaaacagggcatccatacctgtctggacacctcagggatcatgtaccgcaaagagcggcaggaaaagtttgtacagctctttaaggttcttgacctggtgcttttggattttaagcacagcaatgaaacaggtcataaaaaccttacaggtcttggacagaagcatgtgctggaatttgcccgcgctctggaagaaaaaaagattcccatgatcgcccgccatgtagtggttccggggatcacagacgataaaacgcacttacagaatctgggaaagctgcttgccggttttcgcaatctgaaaggcctggaggttcttccctatcacaccatgggcaaagtaaagtacgataagctgggcttatcctatcctctggagcaggtggaaaatatggacggggaaaaagcgaaagaggcgaggaatgtaatactgagagcttttcaaaaggaaaggcagaatttaattcttgacaaacctgcagggaatcgttagaattattaaagataaagacgaagaagaggagtagtaggaaaatgtttcctttttcagagacctgccggatggtgcaaggcaggagaggatatttctgaactcgccctggagttgccgaagtgaactgaaagtagctttggacgggaaatcccgttacagatttaatgagtgcatcggatgatatccggtgaattagagtggtaccacggaattcagcctttcgtctctaactatggagatgaaaggcttttttatttatcacaaaagtagtacaggctgtacggacttttctgataaacaaaaatgctccgccaggatgcgattccatttatacaaggaggaaaaaacaatgtcagtaccttacaatcataaggtgatcgaaaaaaaatggcagaaagtctgggatgacaataaagcttttgccgcaacagatgattacagcaaaccgaaatattatgctctggtagagtttccttatccgtcaggacagggacttcacgtaggtcatccgagaccttatacagctcttgatattgtggcgcgaaaaagaagaatgcagggctacaatgttctctatccaatgggctgggatgcttttggtcttcctacagagaactatgccatcaagaataagatccatccgaagatcgtaactgcaaataacgtaaagagattcaaagaacagcttcattctctgggatattcctttgactgggacagagaagtaaacaccacagatccggaatactacaaatggacacagtggatcttcctgaaactgtttaaggcaggacttgcttataaaagtgaaatgcctattaactggtgtacttcttgtaaggtaggtcttgcaaacgaggaggttgtcaacggtgtctgcgaacgctgcggttctccggttgtccgcaaggtaaaaagccagtggatgctgaagatcacagattatgcagaaaagcttctggaaggccttaacgatgtagattacattgaacgtgtaaaggtttctcagaaaaactggatcggcaagagccagggcgcagaggttgattttgccattgcaggcaaagaagacaagcttacggtatacaccaccagaccggacactcttttcggtgcaacctatatggtagtttctccggagcatcctgcgctggaaaaatacaaagacgagatcaaaaacatggatgccatccgtgaatatcaggagcaggcagccagaaaatctgattttgagcgttctgagcttgcaaaagacaagacaggtgttcagatcgacggcatctgtgcagtcaatccggtaaacggaaaagaaattcccatctgggtttccgactatgtactgatgagctatggaacaggcgctattatggcagtaccggctcatgatacccgtgactgggaatttgcaaaaaaattcaatcttccgatcattgaagtagtagccggcggcgaaaacgtacaggaggaagcttttacagacgttgccacaggcaaaatggtaaactccggattcctggacggactggaagtagccgaagcaaagaaaaagatcattgactggctggaagagaaaaagcttggaaccggaaagacaaattataagctgagagactgggtattctcccgtcagcgttactggggcgagccgatcccgatcgttcactgtgacaaatgcggctatgtggctcttcctgaaagcgagcttcctctggagcttccggacgtagaaagctatatgcctactgataatggagaatcacctctggcagctatgacagactgggtaaacactacctgtccgtgctgcggcggtcctgcaaaacgtgagacagataccatgcctcagtgggcaggctcctcctggtatttcctccgctatacagatcctaagaatacagaagctcttgcaagccctgaggccctgaattactggcttccggttgactggtacaacggcggaatggagcatacaacccttcatcttctgtattccagattctggcataagttcctgtatgacaacaaggttgttccgtgtccggagccgtatcagaaacgtacctcccatggcatgatccttggcgaaaacggtgagaagatgtccaaatcccgcggaaacgtggtaaatccggatgagatcgtaaacgattacggcgcagataccctccgtacttatgagatgtttatcggagcctttgacttaagcgcatcctggtctgagaacggtgtaaaaggctgccgccgtttcctggaacgtgtatggaagcttcaggatattctggtagatggtgatgatttcagcagtgatatggaaacaaaaatgcaccagaccatcaaaaaagtaagcaatgactttgaaaatctgaaatacaatacagctattgcagctcttatggctctcctgaatgattttgccaaaaaaggcagcatcacaaagggcgagtacagaaccttcctgcttctgctcaatccggttgctcctcacattacagaggaaatctggaatacctgcggttatgaaggctatgtataccagcagacatggccggagtatgacgaggcaaaaactgttgagaataccattgagatcgcagtacagatcaatggcaagacaagaggcgtagttgccctccctgttgatgcagacaaggaaactgctcttgcaaaggcaaaagaagtagtggcagataaactgaccggaacgatcatcaaagagatttacgttcccaagaagatcatcaatattgtgcagaaataaatcatgtaaataaaataagagacaggactctgtatgcttgcatatcggaggtctgtctcttaatatttttttatacttatttcattgttttacccgaaacagtatgctatcataaaatcagcacttgtatggagccgcttacttaagataaacattcataaaattccacacacattatgaatgaagaaaaatcttaaaaggtggtgacaaattaggtaaaaaagacgcgattactaaggattacatgaatgatccctgtatctttgctgatgcatttaatttttttatgtatgatggcagacaggtgatccttccggaacaactgcattctctggatgccgcagagattgctattccctatatggcagatgggaaaggatatccgatacagaaattcagggataatctcaaatacctggcagctatgcaggacgagcataccgcctaccttcttctgggaacagagaatcagtcggaaatccattatgccatacccgtgaagaccatggtatatgattctcttcaatatgcatctcaggtagatgctgtaggaagaagatttcgacgacatttaaaggcaggagaaggacacggttacaaaataagtccaggagagttcctttcgggtttcaggagggaggataaattgctcccggtgatcacactggtgatttattttggcccggaaaaatgggatgcgcccatagggctgcatgatatgatagaaattaccgatccaaagcttttattatttattccggattacagaatcaacctgatatctccgtacagtatccccgatgctaaattagaccagcttcataccagcctccgagaagtgcttttatttattaaacattcaaaagataaaaaccggcttcgtgatatggtgactgcagatccgcacttcctgtctgtagatcagaaggccggtcaggtaataaagctgttaactggaagtgattttgaaatcagggaagaggagggagcaatcaatatgtgtaaagctcttgatgatctcaaagaagaggggcgtcaggaaggactgactggtgcaatcttttcattgctgtcggaactgggaacaataccggaagcaattcgtgttcagatccaggaggagaagagtatggaggttttgaacctgtacttaaagaaagctgctgcagcaaagacgttggaggatttttgtacagctataaaataatattttctttattttgccaaagaaatgcagataagaaaaaaatatataaaattgtaggcagtgaaaaatgattattccgggataagccttgttgggtcattttgcctgcagcggatgcttgatgagaaaacactgattacaaatccgatggaacttgaatatgtccaggacaatttgtattggcagcaacaatagaatattttgaggatgaggatgtaaatttattcaaaaaagaaacagcgctgtcaactttggcattgctgttttttttaaaagaaaagtggagaaaaattgttataaaggatagatattgatcctttgaatcagcccttcctctgtaagatcggaaagaacagcgtaaatcggtacaatataaggcctgaggcggttttttattatccggttgtcagactttgggattaagttattttgttaccagtagtgtaaataattgtaaagtatgatattatgaaaaaataaacagatatggattactccgtatttcctataaattacaaaaaattgtagaaaaagaggaaccatctaatgaaattgaagaatgttttaattgttgttaaggatattgaaaaatcaagacagttttataaggatttgtttggtcttgatctggtacttgataatggcggcaatatgattttaacagaaggacttgtgcttcaggatgagaaaatctggaaaaagtttttggagaaagatgttattccacaaaataattcctgcgaactgtattttgaggagccggatatagagtcttttgtgaaaaaactggaatatttttatccttcaattcaatatgtcaataaacttatgacgcatagttggggacaaaaagcagttcgtttttatgatttcgatggtaatttaattgaggtaggaacaccgatgtaaagttgcaaattattatttgccggattaagttaatcatgccatatggtttgattataaatgcaaagataaaaacgcaatgcacacttaaaaatgtgctagagctggtaggtagcccagccgtcctatgtaagtagggtaagtaacctgcccctccgggttgtccgttctttgttcaacaattattttaggagggattttcatggacaaagtaagtggaaaactgacggtatattttgaagctccattctgggtaggtgtgtttgaacgtgtcagggatggaaaactatctgtagccaaagtgacttttggtacagaaccaaaagattatgaagtacagggatatattcaaaaatgctattccggtttgaaattcagtccggctgttgatactggtgtaaaggatataaaaagaaatcccaaaaggatgcagcgtgaagcgaaaaggcaaatgcaggaaacaggcattggcacaaaatcacagcaggcattgaaattacagcaggaacagaacaaacaagagcataaggtcagaagaagagaaaaaaaagaagcggaagaactgcgaatgttcaaactgaaacaacaaaagaaaagagaaaagcataaggggcattagccccttgattttgcagaagttagggtgttaagtgaaattggaacttggagtgaaattatggactgtataatacgagaaatgagaagcgaagaatactgcttattaagtgattttttgtatgaagcgatttatattccagacggaattgaaccgccgcctaaatcagtaatagaatgtccggagttacaagaatatatcatcgagtttggaaatcgaaaacacgacaaagccttagttgctgaaattcagggaaaagtagcaggagttatttgggtaaggattatgaatgattatggacacattgatgatgatactccatcacttgccatgtctgtctgtcagaaatatagaggattgggtattggaactttattattgaagaaactattacaggcagaaaaattggctggatattcaaaaatatctttatctgttcagaaaagtaattatgcagtgaagatgtacgagaaagtgggatttactgttgttgatgaaaatagtgaagaatatattatgactgtaaatctgtaacagaaaaccacagttcgcagaactgaaaaaaatagaatctgagaggtgaatatgaaaaaatatacttatgttactttaagacaaaaacccgaactaaaggaagctgcagctgcgtggtttcatgataaatggaaagtgccgcaggaggcttatcttgcatgtatggaagcttatcttaatcatgaaacagaatatggatggtatctttgcttagacgacgggcgcattgcgggaggacttggagtgatcgaaaatgattttcataacaggaaagaccttgctccaaatgtatgtgcattatacacggaacaagagtatcgttgtcagggaattgcaggacaactacttgataaggttgtaaaggatatgaagctaaaaggaattactcctatctatttgattacagatcatacaagtttttacgaaagatatggatgggagtttttgtgtatgtttcagggggataatgagcctgatatgacgagaatgtatatccacagatgaattatttactataaatgagcaaatatcgaattttgcacaatagaatccgtaacacacagacataaagggaatattaagctttatatgtgcatcttataaagacaaattcgtgatgattttgtgtactttttcaaatttgctcattcatagttatttatatgattgataaggagagatctgaatatgaggaaattctgggacttttttaaaaatgaatcctgtagcgcaggaggtaatgacggaacctatatatggagataagagtattacgatattttttgacagcagcaaaagaacaaaattttacaaaagcggcagaacagttacacattacacagccaaccctgtccagacagcttgctgcatttgaggaggaactgggcatctctctgtttgtccgcaaagggaaaagcattacgcttacagatgaagggatattgttaaagagaagggcattggaaatccttaatctggaagaacgaacgctggaagaactaaagggaacggagaaagcgatagagggaacagttacttttgggtgcggagagtttacggctgtggaaatgctggcaaagatttgtaagaggtataaacaaaaatatccccttgtccggattgcgcttcatactgcaactgccgatatagtatatgagatgatgaataaaggtcttgtggatgttgcattgtttatggaaccggtagatacagaagggcttgattatatcagaataaaagacagtgatcattgggtagtaggaatacgcccggatgatcctcttgccgagaaaaaatatatagagaagaaagatcttctggataagcctttgattctgccggaaaggatgggggttcagagtgaacttgcaaactggtttggaaaggatttttctaaacttgatatttcgtttatcagtaatcttgggacaaatgcaggtgtgatggcggctaatggacttggatatccaatatctatcgaaggtgctgttaaatattggcgtgaagatattcttgtacaaagaaagctgtatccggaaattactgcaaattgtgtaattgcctggagaagaaatattccttattcacaggcagtaaataagatgatagaagaaatcaatgcctttcaggcataaaacagaatacaatataagtattggacataatgagatcataaactgtaaaatagatgtgcgggataggaaaatattctgcacatttatttttgcaaaggagattgacaattatgggaaaaagattagtggcatattttagtgcaggaggaacaacgaaaaaagtagcagaaatgattgctaatagtgcaaaagcagatttatttgagatcgaaccaaagattccttacacaaaagcggaccttgactggatggatcaaaaatccagaagcagtatggagatgaatgataagaaattcagaccagaagtattggatacagatacagatttcaatgcctatgatgagattattttaggatttccaatctggtggtatgtagcgcccacaatcgtaaatacttttctggaaaagcatgatttttcagataaaaagatcattttgtttgctacttcaggtggaagcggatttggaaataccataagagaattaaaaccctctgcaccaaagagcataatggaagaaggaaagatatttaataatgcgacgaaacaggaaatcgctcaatgggcagaaactttgcaggattggagagagacactatgaaaaaaattgtacagacagcaggaagaaatgctttagaagaatttgctccccagtttgctcattttaatgatgatgttctttttggagaaaactggaataatcaggatattgatgtaaaaacaagaagtattattacagtagtggcgcttatgtcctcaggtattacagattcctctttgaaatttcatttagaaaacgcaaaggaacatggagtaactcaaaaagaaatagcagcgattattacgcatgctgcattttatgcaggttggccaaaaggctgggctgtatttcatttagcaaaagaagtatgggatgtgaatgaagatgatttcccttatgaagatgaaggaatgagggcacatgccagagaaatgatatttccgataggggcaccgaacgatggatacgcacagtatttttcgggaaagagttttctcgctcctgtttctgcttctcaggtaggtgtatttaatgtgaccttcgaaccgggatgccgaaacaactggcatatccatcatgcaaagagcggcggagggcagatactgatctgtacagccgggcgtgggtattatcaggaagaaggaaaagaagcgattgagatgaaaccaggcgactgcatcaacattttggcaggtgtaaagcactggcatggagcagcgccagatgaatggttttctcatcttgcaattgaggtaccgggagaagaaacgttaaatgaatggtgtgaaccggttgcagacaatatatacagtaaattagtctaacgaaaaggatataacaaagattaagaaaacctccatttcataaagctagtgaaaaattagaagctactgttttatattgcaaaaagatatgataaaattacagcaaataaagcagactgacggattttaatatggtttttggaattctatgaagagttgtccattggctgtaaaatgtggtttttatcatacttcacaatacaatcctgatacagaggaacaaaaatcggatatgaaattttcatcagatggcaatttaactttacatggagggaaaatatggcatcaagtaaggaatatctgcagtttattttggaacagttatctgaattggaagacattacatatcgggcgatgatgggagaatttatcatttactatcgggggaagataatcggaggtatttatgatgacagattattgataaagccggtgaaatcagcaatttcctatatgcctgcagcttcttatgaaagaccttatgatggggcgaaagagatgctgttagttgacgaagtggataataaggaatttctggcaggtttatttcggaccatgtatgatgaacttccgtctccaaaagcaaaaaagaaaaaatagccatattaaagggggaattttatgaaaagggaactgggaatcgcaagatgtggccttgcatgttgtctgtgttccgaaaatgtaagctgtcaggggtgtgattccgggcaatgcccggataaggactggtgtgaaaacagaaaatgctccatagaaaaagactactcccattgttatagctgttgtaatgaagaatgcaggaagggactgctgtccaaaataaagccttatggtttttctttatttgctaaaagatatggagaggaagccctgctggattgcctggaacgtaatgaaaaaaatggtgttgtataccatcggcagggaattgtcggtgattatgatgaatttgatgatgtagaagaactgattcggtttattgaggagggaaagtgaggaaactcagatttccggtacataaagggaaataaagttaaaaaaatttttttacacagtaggagcggccagcaacaataaacagaattttacaggagctaatattatatgaacctgacatacaagagagcaaccattcaagatatagacatgttgacaaagacaagaacagaggtactgagagcagctaatcagctttccgatacagtggatatgagtcatgtggaaagagagtcttataattactataaaaatgcattaaataacggttcccatattgcgtatcttgtttttgacggagatcattttatagggactggcggtgtgagtttttatcaggtaatgcctacgtatcataattcaagtggcaggaaggcttacataatgaatatgtatacaaagcctgagtacagaagaatgggaattgcaggtaaaacactggatatgctggtcagagatatcaaaatgagggggattacagctatttcactggaagcaactgatatgggaagagccttatacgaaaaatacgggtttgtaaaaatggaccatgaaatggaattgccagaggaacaatggtgataaacttcctaaatgtagcctgagagagaaaagatgatttttataaggatgtaagagctatgagagatattatggaatgtctgcaaaaggagatatacgaaagatgccaaaaagaaacaaataaatttggtatgggatgctactatcatattgcttctgtagtaaaaaatgcagaaattctggcagataaatatggtgcagataaggaagtggttatgattgccggttggttacatgatgtagcctccattactgattacagactatacgaacttcatcatgtgcacggtgcccaaatggcatatgatatcttaaaaggatatggatatgatgctcgaaaaattcctttggtgcaggaatgcattaaaaagcatagaggaagtgtgaatttagagaaaaacagccttgaagagctgtgtgttgccgatgctgatgcaatttcccactttgacagtatacctgatttattgtatttggcttatgttcagaaagggatgggaattgaagagggtaaggaatttgtaaaggaaaaactaaaaagaagttttcaaaaattatcgccagagagtcaaaaatactacaggtcaaaatttcaaaaggttatggaagtcttaaactgaaaaagaggcattgaatttataaaggaaagaaaagtgattatacaagttgaaaataacaaagaaaaggaaatgatatctcgtacaatattagaagccttgcctgactggtttggtcttcctgaggcaagggaagaatacattgtgaatagtgtaaatcaacagttttttgctgcagtaaaggaagaaaaaacaatcggctttctttgccttaaacaaacagggaaagatactgtagaagtgtctgttatgggtgtactaaaagaatttcatcgccatggaatagggcggaagctgtttatgaaggcaagagaaaaagcaattaaagacggtttttcttttatacaggtaaaaaccgttcagatgggtcagtatgataattatgacaatacaaataaattttatataagccttggctttaaagaatttgaaatatttccgactctttgggatgagtggaatccctgtcaggtttatgtaatggctttattataagtgcagggatagaagttttatagatatacggggtgaatagtccttgaaagctataggatcagataatccatcagacgaaataaaaatattttgttaatgcaaaacagaattaatgcttgtatctcagatagtattatgttaatatttattcataaattatgaaagaaactcaaggaaaggaacggactatgtactggaaaacacctgaaatccaacttgaaaatggttgcaaaatggctgtttacggggatagtacgctctttttcaggtgaaggatacgaagtaaacagcgaaaacgcattatttttatccatatatgagcaactatctcctttatcaaatgaatgaatataatttgaaaaggagattttttatgcataaatttaatataaaaaaacaggtcgggaagctatatggcattacggcaataggatatttccagattgcaggagcctcctgggtggctcttcttgcggcaagaggattttcgcttattgaaattggaatcatagaaagtatttttcatgctgtaagcatatgttttgaggttccatcgggagtagcggcggacgtatttggacgtaaaaagacccttgttataagtcagatcgtatcgctgatatccaatattttgatgattttttcaggcggattctggtccacagcgctggcaatgggcttttctgctttaagctataatctgtcatccggcacaagagaagcgctggcatatgacagcttaaagtatgtcggacaggaagaaatatataacagatttgcttctgcagaaatggctctttacagaatcagcagctcaacggcaaccttatgtgcagggctggcgctttttctcggatataagacagcctatgcaattgacgttttattcagcattggagccctgagcattgcattgtgcttaaaagaggttgaagctgattgtcaaaatacagaaaaaaggcaagaaagcatactggaaaaactgaaaaacatagttctggaaagcgggaaatttctgctaaataacggaaaagccagaactattatgatcgtcaattctctgattggggcagtttccacacttgtgctttttttcctgcaggcaaaacttccaatggccggactgaattctctggcgttgggaccggctttatttataatgggactgggagcagttgtgggagccagaatggttgcttattttcctcaatacagctataaaaaactgcttacactaagtgcttttggagttggatgtgctcttgcagcagcccttaccgggaatgtcttgattatgatcgcaggtggatttctgggagcgcttgcagatgattttctggaggtaaaaacagatgtgattctgaatgaaatgattccgtccgagcagagagcaaccctgatttctgtaggctcttttatgttttccatagtaatgatttttttatcaacgtttatggggtggatgctttcctgaataggctaaagatatggaaacatggagaacattgtgatccatatttctgcgacagcaatattttttctaaacagaggacatcagatgggatgatacgggatttcttttataaatgatgctttgtatgatgaaaacggaaaagaaacaaaatacagcggctgaattatatggtctgcggtgatattctggaaatcaatgagtaaacgaaaactgccggcagatcattctgccggcagtttggcgtagcgttataattattttgctgcagcagcctctgcaatcgcttcaattggcgcctgctcttcaagaacagaaacattttcaacgcttttatagaatttttttaatgcaatttctgttttttgttctgctgaagataaagagcatgatcaataaggctgctggaaaaataagaccaatacccatacctgcgcggatattgtttcctgtattttgtgttacacgccccacgattgccggcccgatgctgccgcccagatcgcctgccatggcaagcagcgcaaacatggcagttcctcccatggggaatttttgtgaggaaatgctgatggttccgggccacatgattccaacagaaaaaccacagataatgcagcccacaagtcctgtaaatggtgaggaggacatggaagtgagaaggtagcagatcacgcacagaataccagatcctgtcataaatttcataagatctatcttatctccatattttccaaaaatgatacggctgatgcccattgtaaccgcaaacatgcagggacctgccagatctccggctgcttttgacaatcccaaagcagcttctgcgtaagcggaagcccactgcgccatggcaagttctgaagcgccggagcagatcatcagacaaactgcaatccagaatataggcttttggaacagtttttttattcccattcctcccccttcctctaccagatgttcgatagggcaggtggcaaaattatagatattgacagcagggataagggcccataatacggccagccatttccagttatccattccaaataccataaaaaacaaggtggaaattaatattgtcccaacagatccccagcaataaaaggagtgcagcaggctcatggtggcttctttgttttcaaagggacaggcttccacaataggactgcagagcacttcgataagaccgcttccaattgcgtatatgatcacgctgcacatgattccaataaagggattgggcaggagatccggcagaaatgccagccctacaagtccggcagcagcgcatatttcagagcttacaatacaggtacggtatccgattctgtctacatattttgcgcagaatgcatctaccagaagctgagtaaagaaaaagcatgtagagatcagggcgatatttccaagagaaatatcatagtcatggtggaattttaagaacaacaatggagcaaaattagcagtaattgcctgtgtgataaagcccagataacaggcaagctttgtcttttgatagtttggcatagcagattccttccttttcctgaatgttgcatcaaatttttctgtattttggattatataatacaaaagcaggggtttcattgatttatatctgatatttattgtataatatcgtaaaacagatcatggaggaatgatgatagtatggcatctgatcagcctttcagcaagattgtcacagatgaaaatttaatggaaactgctcagcatggcagcagaaattatccctttgctttttattatgaggatttatctttatttgactttaactgcgtggaatggcactggcacatggaattagaatttgtgtatatggagtccgggaccatgactttctggattggagaaaaacagtttgttttgtcccagggagacggattatttattaactccaaaatcctgcaccgcttttattcatctgacggcgcagtaattccgaattttttgtgtatgccttcttttattgctgtgcaggacagtcttatttataataaatatattttgcctgtgatttcatcttctctggaatttcagatttttaaaagagaggttaagtggcaggccaaagctctagagctcataaaacagatcattgcagttcaggaagataaagccttctgtgagcttgcaacatcgtccctggttcaaaagctctggctggagatatatgaaaattcagatatgaataatgaaaaagacaaggtaaacgctgccgtttcttttcaggcgagactgcagatcatgatgcagtatatccatgaaaattatactcatgatatctcattggatgatattgcctgttatgcaggaatcagtaaaagcacagtattaaatctttttcgtaaatatctgcatattacccccattcattatctgattcattaccggctgaaggaggctgcgcttctgcttgtaaaaaccgagaaaaaaatcgctacgatatcagatgaaacaggattccataacgtggattatttttgcagattatttaaaaagcattactgtctgacgccgacacaataccggaaaaagaaagccttattttaattatgacatacaggtgtcatatttggagtgctatattaaaggagagggcagaatatgaagattgaacggctcattggaattttgtctgttttactgcagaaggacatggtgactgcggctgatctggctgatatgtttgaggtatccaggcggacgatccaaagggatattgaagatctgtgcagggcagggattcccttaatgaccagacagggaacaggcggcggtatttctattatggaaaattaccgaatggatcggactgtttttacagcaaaagagatgaaggatattctgactggtattcacggtcttgacagcattcacagaacaaacaaatacggacaattgatggaaaaagtctgtgcaggctcttcggattttgtgacaggagatcagaatatccttattgacttatcttcctggcataaaaagtctttgatccctaaaattgaaattttacgtacagcaattgagcaatatagaatcgtgaaattcttgtatttttctccggaaaaaagcaccagaagaaggattgagccgtattatctgatttttcgctggtccagctggtatgtgtggggctggtgctgtaaatgtaatgaaagccggctttttaagctgaacagaatggaagaactggaattaacagaaaatatttttgaaaagcgtaaggtatctttacctgattttgattatgaaaacatgttcccaggaagatttccagtaaaggcagttttttcggggaaatgcagatggaggctggtagaagagtatggaaaggacagtttccaggagcagaaggatggaacgcttttattttactggatattttcagataaaaatcatctgatcagatggcttctgacctttggagccgatgtaaaagttctggaaccctcagaaatcaaagaagagataaaagcagtagtggagcaaataaggagaaattatcaggaggaatagaaatggcatttgattataaaaaagagtataaagagttttatcttccaccgaaaaatccgggaatcattgaaataccggaaatgaattatgtggcagttcggggaaccggggatcctaatgaggaaaatggagaatacaaaaaagcaataggacttctttatggaatttcttttacgattaagatgagttacaaaggttctcacagcattgaaggatatttttcctatgtggtaccgccgctggaaggactctggtggcaggagggcagccgggaatgtattgactatgggcacaaggatgcctttcagtggattaccatgatacgtctcccggattttgtaaaaaaaggtgattttgagtgggcagtaaaggaggcatctgctaaaaagaaaatggatttttccaaagtggaattttttacttatgaagaaggaatctgtgtacagtgtatgcacatgggcagctacgatagtgaaatggaaaccattcagaaaatgaaaaaatatgccagtgatcaggggtatgaaccagattactcccaccgtttccatcatgaaatttacctgagcgatccccgtcggacagcagtggaaaaactgcgtacagttatccgaaatccggtcagaaaaataaatgacagaagataaaaataattgtttcagaatggtacaacaggctacaggagaaagaggaatggatcagccaaaaaaagaatgcaatattcaccaccagggtaatgatatatactggatggggaaattacagcctgttaccagattggaaacatgaaaatccatacaaatactttcctttttctggctaatgctatagtatacagaaaaaaggaggagtacagcatggcattaagtgaaaatattaagaaattacgggaagagaagaaatttactcagcagcagcttgcagacaggctttatgtgtcgagacagacagtttgcagatgggaaaatggttccagatgtccggatctgattactgcaaagcagctggctacggaactgaatgtaagtctggatgaactgatttctgatgaagatgtaaaggattaccagaaaaattatggaatatggaaatcggagaaagtaagatccaggaagaagcttcaggaacttcagaagaaaacattatcttttatagaaattatcggggcgttatttctgacagcgacaatattttttcgtgttcagatgcatcaaaaagtaccggaatggtgtacgatagtttgtctttgtgttgtgttaggagctgttgtgctgaatcttgtgatttcccggaaactgagaaagatagaagacctttgaggattgtaattcctgagacagatgatataattcattaggaaagtatcagattcagagttgacaaaaagagcagttctgcaataaatcggaactgctctgaatgtgattctttcatattgtacccagtcgcggtattttagccagttcttatatggggattgtattgttcccagatggccaaaatcgtcgaagatgatgagaaatcagctgaaaacacgctgatttttgtgatgtaaaacattgcaggacatactttcaaagcctcccgttggcaggctttttcaaaacaatataagaagtcaggataatcaggatggtgcataacaccttcccagctgtttcatggaactatgtccacaatccgggcagatagaaatatcaaagtcccacacagcctttaaaagctcagacatggacatctctgtaaaccgtcttttaaaacgctggtgtccctgcagagtaaaaatgagtttcagattttttctcttcatccggttgttcaggaaaccataataacggatcttctgaaaaccggatggaagcacatgcagcaggtatctccgaatgaattctgtatgctccagagtgatctggcgcctggactcgccgggcttttttcccctggcggagaatgtgacttccttttccgtgacggaaaggatacggttgttggagatggcgattttatgggtataccgtccaaggtattcgagcgcattgccaaatccgttaaaagtttcttttatgtaagggcaccagtctttgccgtaaagatcatttttgaactccttccactcataggaattccggagtgtttcacaggaagaagagagaacgatctgtcctttccggtacatggaatcaagctgggaaagatatttccctttaaatttatcccggagtaccccgacaggaatgaaaaacttgttttttgacctgcgtatcttcttgtcatatgtgaggccgccaccagaaacaatacagtgcatatgcacatggtagccgatctcctggttccatgtatggagcacctgtatgatgccaggtgtcgcaccgagatacttcttatcgtaagataattcaagaagtgtttcggcacagcatctgtgaaaaagcccgtacagaagcttctggttacaataaataagcgggtttaactcatggggcagggtgaagaccacatgaaaatacggtgcatcaatgacttcctcccggcgtttatccacccatatttcttttaagacagcctggcagtttgggcagttccggttacggcaggaattattgtggaattccgtatggccgcactcggtacattggcaggcattggctccgagagcgccggatttacaacgcatgacagcgtgggagacttttttctggatgtcagaaacagggtgcccggaagaaagaaaagagtcaaaagaacactgccagatcttctggattttgagatcactcataaaacccacctgccattctgtcaaaaggattggaagaagccatcagagcatttgatgccagatgtacgtatataaccgtggaagaaacagaccggtgtcccatgagcgctttcaaagtgagcaggtcggttccgtcttcataatggtaggtggcaaaagcatggcggaatgtgtgacaggtaaaacggtgctcccatccgagttctttttcgtgtgcaaggataaagctggggatacgctggtgatcgatgggtctgtccggttttttcttctgtggaaagagccagtctttcggccgggaaccagccggaaatgaataccagtaccggaggatgagttcccagacgttatcagaaagaggcacgtaacggtcagagcggttcttggaagcacgtatatgaatacgttttctggaatgttcaatgtcagagcatttcagatgacgtacctcgcccacccgcagcccggaagaaaacataaggcagagtatggccttaaactttatgtcagaaatggaaaacaggaatgttttcatttcttcacgtgaagggataaaaggggtataagagtcaaattttctgaaagggagctgataggggtcccagggcttatggaggacataaagtgtaaaaaatctcagctgtgagatgcaggcatttatcgtacggtcagaaagatttcttgtgttctggacccaaaagataaagtcccgcatctgctgccatgatgcatcttccggtgcagtggggccgttgtcggaaaggtactgcagataagcggagatataggtagaatacgaagcaatggtgtggtcagtaagaccgcgcagggagaccatctccctgaaagaagataaatatttgtccataaggaacctcctgtaaatgaaataagattgatttagagtcaggatatttcaaaacaggcggtggacggataaaaaagtaaaatatgtacttgttaagtttaaaaatccatgataacataagcatagcagtttttttgtattgttttaggttgtcttgtggtgattcaacaataaaacatatataaaaaaactgctacttttattttgaggaaaacagatttctttgaaaaaaagtaatagaaccacgtacttaggactagccgtcgcgctagcgacttggtacaataaaaaaagaaagcttcagggaagagatagagaaataattgatatggagaattatatgcagacaacgggaattaaacagacagtgatacaggaaatccaggagttagcagtgaaacatggtgtttccagagtgattttgtttggttcaagagcaagaggtacttttagagagaaaagcgacattgatcttgctgtggaaggtggagattttataaggttttcactggatgtagatgaaaatacctcaactttattgaaatatgatttcatcaatctggatgagcctatccaggaggaacttcgcgcatcgattcaaaaagaggggaagctgttgtatgaaaaaatttgatcattttaaatcaaatcttaaaatattggagaaggcagataaagaagatttgacaaatgaatttattttaggtggaattattgataaattttttattcagtttgaattgggatggaaagttttaaaagaattattaacgtatgagggacaagctgttgctgcaagtggctctccaagaatgattctaaaagcagcctttacaatttatgattttttggaggaagagctttggttgaatatgttaaaagcgagaaatgatatgacacatatttacgatttttcagcagcaaaaagaatggtagaaattatattaaaagattatattccagcttttcagaggatgaaagaagaaatagaagatatttatggaaatgagcttgataaaatgtaaaaatattgtcatatagctgcaaaaaggagaaatctatgattattgatatcattgaatatcagcttaaggatggaagaaccgcacgaatccgcagtccaaaagatgaagatattcaggagatgctggattttctgtatgtttcagctggagagacagactttcttatgcgttgtccggaggaatgcggcagatatacaacagaaagtgaaaaacagcgttttgacagagtaaataaagcggacaatgaaaccatacttctttgttttgtggatggaaagcttgtcgggagcggacagattatgtggagtaaaaggataaaaaccaggcatcgggccagcatatctgttacagtgctgcgtcaattctggagtcagggaattgcagtaaagctgattcaggagctgataaaaattgcagagaaaaatccggatattttgcagatagaactggaatttatagaagggaatacccgggccagagccttatatgagaaaatgggatttcgtattaccggggaaaagccaaatgcgattcggcttaaagacggaactttattaaaggaatattcaatgatgtgggaaatacaaagacagatgatataagaaagcaggtggggttttgaagggaatcgcagatctgcacatccattcccggtattcccgggcgacaagtaaacagggaacaccggagtatctggatctgtgggcaagaaagaaaggaatctccatagtgggaacaggagactttacccatccggaatggcggaaagagctggaagaaaagcttgttccggcagaggatgggttctattgtttaaaagaggattctgttctggaagagagcagagagtatgaaggagaggctcccagatttgtactttccggtgagatcagttctatttataaaaagaacggaaaagtccgaaaagtacataatgtaattcttctgccgggtcttgaggatgcagaaaagctttcgaaaaagctggaaaccataggaaatatccattcggacggcagaccgatcctgggccttgacagccatgatcttctggaaatcatgctggaaatctgtccggatggaatactgatcccggctcatatctggacgcctcacttttcgctttttggcgcattttccggatttgatacgatggaagaatgttttgaggatctgactccttatatacatgcggtggaaaccggtctgtcctctgacccgccgatgaactggcggctttcggcgctggatcgcttccagcttatttccaattcagatgctcattctccggcaaagcttggaagagaggcgaatcttcttgatattgaaatgagctatcagggactttataaagcgattcaggagggcgaaggcctggaaggaaccattgaattttttcctgaggaaggaaaatatcattttgacgggcacaggaaatgtcatctctgccttactccgaaagaggctgaggcttatggtggaatctgccctgtctgtggaaaaaagatcaccattggggtggatcacagagtgatgcagctttcagacagggaagatggagaagcccggaaaaataaaaagccttatgaaaatcttgtgcctttgccggaagtgatcgcagcgtccacaggcaaatcctccggcagcaaaagggtgcaggaacagtatgaaaatatgctgaaaaagcttggatctgagtttgatattctgaggaagattccggtggaagaaatcaggaaagaggagggctatcttgtctctgagggtatccggagattaagaaccggacaggtgaaaaaaagccccggatttgacggggaatatggtaccatcagtctttttgatccggaagaaatcgaaaatcccaatggacagatgtcgttttttaatgagtgggaaagggaaaaggaaccaggcattcaggcagtggattcctgtatctcaggaggattgactcagaaaaaaacggaagagctttccgggctgtctgtggaagacagagaagagagcgttgctgagaaacagaaggaaaccattcagcagttaaatgaaaagcagaaacaggcagctgagacaatcgcccgcagaattgctgttgcagcaggcccgggaaccggaaaaacaaagacgctgatttcgcggattctgtatttactggaagagagaaaggtaagtccgggagaaattacagcagtaacttttaccaatcaggcggcaaaagaactgaaggaacgactggaaaaacagcttggttccagacggagtgtaaattgcatgcatatcggaacatttcattctctttgtctggattttttgaaaaaacagggaaaagaattctttatagcggacccttctgcactttcagaaacagcccgagagatatgtaaagagtatggactttccataacgccgtcgcagtttttgaacaaagtttctgtacagaagacaggagcattttttaatgaggagccggaattatgggaagaactcctggaagtatatcagaaaagattaaaagaagaaaactgctgtgatttcgatgatcttctgttggaaacgctgaaggcttttcgggaaatacacagtcccggaaacagaaaaaaacagccctgtgagcgatgcttttcctatctgatggtagacgaatttcaggatattaatcctgttcagtatgacctgatccgtgagtggaataaaaaaggaaaagagctttttgtgatcggagatccggatcagtctatttatggattccgtggttccgattccggatgttttcttaaaatgaaagaggaatttccggaaacctgtatgatctctctggaaaataattaccgcagtaccggaaatattcttaatggcgccctggctgtgatccggaataatcccggcatggagcgctgtctgaaaccgtggaaagagaccggcttacctgtacagattgctgaggctccatccaaaagatcagaagccatttttgtggcaaaagaggtgagccgtctggttggcggtatggatatgctggaggctcaggagcattttttaaaagaaggtatgaccggaaaaagaagctttcgggatattgcggttttataccggacccatcatcaggcgcggattctggaaaaatgttttcaacaggagggcattccctatattgtcagtggcagggaagagtttctggaggatccgctgatacagggcagtatcagttttttctgttctctggcagaaccggataatccatattataaaaaggatgccttgaaaaagctgtgggatctggaagaaaatgagatcagcggaagtatttatgaagagttaaaagccaaatatcaggacagatggaaaagggaaaagcccaaaaaattcatgcagagctggataaaagatctggaacaggagggaaatccaaagcttcagaatctggcagatatggctattttttatccggatatcagagcgtttctggatgcggttcttctgggagaagagggggacctgaaacgctgcggaggaaaaaatatttcaggagatgcggtatccttgatgaccttgcacgcatctaagggccttgaatttcctgtggtgtttatgtttggaatggaaaagggagaaattcctctggaaagggaggaaaatcccgcagatatccaggaggaacggcggctgttttatgttggaatgacccgtgccagagaagaactgtttcttacctgcgctcaggaaccgtcctcatttctggatgaaattcctgaaacatacacgcagcggaaaacagttggaaagcagaaaagggtgcagacctatgaacagctcagtctgtttgatatggcgcctgagaaataatattttttcagaaaacagatatgagattttagctgaaagggaaaacagaatggatttaaaagatttttttcagcagaatccaagggctgctcttgggttttccggtggagtggattctgcttttttgcttgccatggcagtaaaatataaagctcaggtacagccttactttattaaaacagcttttcagccggagtttgagctgcatgatgccagagagcttacccggcgtcttggtgtggagcttacagtgattgagcacgatattctgagcagccggcaggtggcggaaaacccggagaacagatgctattactgcaaaaaaacactgttcggacttttaaaggaaaaagctttgaaggatggttataccatgcttctggatggaacaaatgcttccgacgatttttcggaccggccgggaatgcaggcgatccgtgagctggaggttcgttcgcctcttcgggaatgcggactgacaaaaacagagatacgaaggctttccaaagaggaagggctttttacctggaacaagccttcctatgcctgcctggcaacaagaatacctgcgggtactgtgcttacagaaccggagcttcaaaaaatcgaaaaggctgaagacaagctgttcagccttggatttacggattttcgcatccggctttttcatggggcagcgcgtattcagcttccggcagagcagatggcaaaaatgacagaaatacgggaagaaatttacagggaactgaagccatactttaaggcagttcttctggatctggaaacacggaagtcggtttgagaaaatagataaagatctataaatgagcaaataaaaatcgaataaaacagtttcttatttaccgctgcgtaatgtagtacatacacagagaaaaaattcaacaggattaaggaggagccgaaaatgagtcagttaaatgaaacgctggagctgatgcagacaagaagaagtgttcgtgattttaaaccggatatggttccggaggacattctggataagattatagaagcggggctttgggcagccagtggaaggaaccgccagtctccgatcattatcaaggttacagataagagtgtccgtgacagactgtgccggttaaatgcggaaattatgggaacggattccgatcccttttatggcgcgccggcagtgctgatcgtccttgcagataaaaacgcccccacatatctttatgacggaagccttgtaatgggcaaccttatgctggctgcccattctcttggaatcggaagctgctggatccaccgggcaaaagatgaattcgatggtccggagggaaaggagctcctcaaagaactgggaattgagggggactatgagggaattggtcattgtgtgctgggatatgtaaatggagaatatccggaaacaaaagcccggaaggagaaccgagtgtattccatagactgaaatgactggtccggctgaccggttttgtgagattttattcagtcctcagctgatctgcataggtatgctcagtcagctcagaaagtaccgcgatttttttattaatgatcgggcgcatacagtttggcacatgctcctggtgcgcccggtgtatggcaacgcattccttgcagttgccgtgatatctgcatgcttttgtgcaggagcagtgatccttatgggcatactctgtgcgaaaagcagaggcaaattcttcctggattttaaggccttcttttcgattgcccagatgaaattctttcatagctcttttttctgtttcattattgtcgataatcatgattttcctccgtttgtgtgaagctttgttttacaggcttgagatggttgtcaggaaacgaatatttttgaccggattctgtttgtagtgacattgtaacttagtcaaaatctgtttcaaatcatctttggtgacggcgttttgctctgtatgtcccgggatttggacatttatgagagaacaccttacaggacggtactgtgtaaacagtaacacctgtctgttgcaatatcataatatcacgatattttattgaaatataccataataaaaggtaaaatatatatgaaaatcaccaaacaatgagaatattgccagtggaaatcgtaatatattttcctgtaaggagaaacgccatggaaacaattaaggataataccccaatatattcccataacccctgtcacagtaccaaattcccccttcttgtacttgacgtcagcaaaaaagtctgcaaaccttttaacgagggatttcagatgctgcactggcatgaggaaatacagtttgtggcagtgcaaaaaggcgtggtacattttaagatatgggaaaaggaatatgagctttcagagggaagctgtatgtttattaactgcaatgttctgcatcatatttcagaaaaacaggattgcagctatcacagctttctgatcccgcctaaaatgctgggattttttgagggaagtgccatggaagagcaggaggttgatacaattatcaaaaatcctgcagtcacaaatatgatttttctggcacgggaacaaaaagacaaaaaggttcttaaagccatgaatcagctggatgacctttatttttgtaaaaccaggcctgctcattgggaatatgctctttctctttgtatctgcaggctgtggctggaagcaacagagagaatcatggagttttatggctgcggagaagccttcggatacggtgacggcggaaaccgaaacagaatacttccggaagttcttcaaaaagatcatgagcgtgtccagaagcttctgaactttgtccatgaaaattacagaaacgggattactctggaagagatttccagggcgggaaatgtcagcatcacagaatgtctcagatgctttaaaaggtatacgggagagtctccttatcagtatcttcagaaatacaggcttcaggcgggagcttcccttttggaaacaacaggggacagtgtaactgaaattgctcttcgggtgcattttccatcggccagcgcatttatatctgcatttcggaaagcctacggcattacgccaaaaaaattcagggagagtaagcagataaaatctccttccctccctggctgataaaaatttccgggcttttatggtgtcccgtaacggtctggaattgttctcagcttattgctgtgaagcttcttttatttccgagatatccggcttggccataagggaatagttggtgtaataaaccacaaatcccggtttggctcctgccggtttttttacatgctttttctggatataatcgatttccaccttgggggcagtgcggcctttggagtaataggcagccagacgtccggcttcttcaaacgtgcggtcaggcagttctccgtcaggggtttttacgatcacatgggagcctgccattttttttgcgtggaaccaccagtcatttccggatgcctgcttaaaggtcagctcatcgttctggaagttgttttttcctacaaagatatcaaagccgtcactggaaacatagtggaagggctttgatttttcctgcatttttttgccttttttggaagaataatgttttttgataaaaccgtattcagtcagctcctccttgatctgactgagatcgctttcagcccgggcaatgtccagggcattggagatggactccagatgttcgatttcagattctgtttctgcaatctgaccggtaagagcctcttccgtacgtttcagcttggtgtaccggtcgaagtatttctttgcattttctcccggagtaagggtgggatcaagaggaatggtaacctcttcgtttgtataataattcagggccttaaaggacttgcagccttcctccagaccgtatccgtaggtattgatcagctcgccgtagatcctgtatttttcctttttggcagtatccttcatctgttttgtctgaagggcatacttctttcggtttctttcaagggcagtctgaacaatccggcgaaggtcagaagatttctggcggatacggttcagggtatctctggaagaatagtaggtggacagcatggaagatacggtttcaaattccacgctgtgatattccggtccgaactgggtcagaggaagaacggcatattctaccggttcatttccgcgataaatgatatttggagtaaaatccccttcctgtatctgctccatcagtcttttgaatgtatgatacagatggacgcaggtggtttcatccagagagagggcagggtcattgccatcaatggatgcgcggtaacagatttcctctgcaataagaggacttaaacccgtaagggaagaatagagcgccctggaaatattgcagggctttttgcatactgcgctgataaattcctcctcgttaatagtaaggggatctgacttttcctgagtccggggaagaaaatactgccggcccggaagaacctctctcacagagctcatgtgagaggacacatgtttgatgctgtcaaggaccattctgttttcatcgcagaaaataatgttgctgtgtttgcccataagctccatgataagaatttttttacagggatctcccatttcatttagatgctccagctcaaattccaccactcgctccattcccggctgttttatagaagcgatttttgcgctgccgatatgtttgcgcagaagcatgcagaaattgggcgcagtaagggggctgggcttgtttttatcaataaaataaatcagcggaagagaggcgtttgcagacaaaagcagtctgcactgtccctgaccgccttttgccgtgatcagaagtgcgtctgattccggctgggcgatcttattaaaacgtccgccgtcaagatatttatgtaattcctgaaccattgctgcaatggtaattccgtcaaaagccataatgagtactccttttttctttctggctacagtatagcatgtctgtgagaattccgcaaaagaatatgtatggtaatttgccgggctgacagtcgcagaagttattttgttaccgtttacacggtactgttccgtaaccggaatgaacaggaactttttgatcggatacagaaaaaacagtttgactaccctgtttagatgctctataataaatctgtatgtaaacatatattgtgtctgatggaatatgcagacatacatcatgcaaaaagaagtaacctgcaaagtgagacaacattatgataaaaagtatgacaggctttggccgtgccgaggccgtgacaaaagagtggaagatcacagttgagctgaagtcggtaaatcacagatatctggatctgaatatcaagatgcccagaaaactgaacctttttgagggacaggtccgtaatctgatgaagacttacatgcagcggggcaaggtagatgtttttattacctatgaggattatactgccggaagtgtggctcttaagtacaatcgtgatcttgcagcagaatatctgggatattttaaagagatggaagaggagttccggttgaaaaatgatatcggtgtagctgcactttccagatatcctgaggttctgaccatggaagagcagccggtcaatgagaaaaaactgtggacctgccttgagggacctcttcatgaagcgtgcagacgctttgtggatacaagagagaccgagggaagaaacttaaaaaatgatctcctgaccaagctggatgcgctggatgaaaaggtcagcgcagtggaagcccgttcccctgaagtggttcaggcgtacagagaaaagctggaagcaaaggttcatgagcttctggaggattctcagattgacgataaccgtattgccgcagaggttgtgatctattcagacaagatctgtaatgatgaggaaacagtacggcttcacagccatatccggggcatgaaaaaaattcttacagaaaaagaaggaattggccgtaagctggattttatggcacaggaaatgaacagggaagccaacaccattctgtccaagtccaatgatattgaaatttctgatattgccattgatctgaagactgaaatcgaaaagatccgtgagcagattcagaacatagagtaacggaggcggaaatcggtggcaaagctgatcaatgtaggttttggaaatgtagtaaattctcagaaaatagttgctgtggtaagcccggatgcggctcctgtcaagcgtatggttcagagtatcaaaggaaccagagcgctggtagacgccacacagggacgtaagacaaaggcagtgatcgttacttcagacgattatgtggtgctgtcggcgctgcagccggaaacgatcgcaagacgttttgcggaagcatacgattatgaggagcgaggagaggaacatgagtaaaggcgttttggcagtggtatccggattttccggagccggaaaaggaacagtcatgaaaaagcttctggaaagctttgatgactatgcgttgtcggtttctgtaacaaccagaaaaccaagaccgggagaggtggacggaaaggattactttttccgcacaaaagaagaagtggaagaaatgatcgctcaggatcagcttctggaatatgcccggtatgtagacaattattatggaactccccgttcttatgtggaggaaaagctttctgagggcaaaaatgtgatcctggaaattgagatccagggcgcgatgaaaataaaagaaaagataccggaagcggttcttatttttgtaacgcctccttctgtggacgagctgagaagacgtctggaaggacggggtactgagacacagaaagtgatcgaatcccgtctcagccgcgctgctgaggaagcggaaggaatggaagattatgattatcttctggtaaatgatgacctggaggagtgtgtaaatgaacttcaccggatcatttcaagtgaacgctgcaagacacagcggaatacagagtttattaacagaatccaggaggaatcccggggattaatgaaaggagatttataatatgatacatccgtcatattcagaactgattcaggcgatcaacaacaatgcagaggaagacgacaacactatgatgctgaacagccgctactctctggtactggctaccagcaaacgtgcccgtcagctgatcgccggcgctgagcctatggtaagaggagctgcaggaaagaaacctctgtccgtagccattgatgaattttatcagggtcaggtaaagatcgtggctgacaacacagaagaggaagaaacttcagagccggcagtggaaactgcagaggctgaagcagaaagcgctgtacagacagcagaaacagaagaataaaaataaaaggggcggtgtaaatcgaactcccggcggcattttttgaggattccggcggaaagatgattctgcagcgctccttatatatatcaggagaacatatgaaagtattatttatttcacttggctgcgacaagaacctggcagattccgaggaaatgctggggctgcttacgggaaagggccatgagatcgtggactctgaagaagaggcagaggtaattgtcatcaatacctgctgttttatccatgatgcaaaagaagagagtattgaaaatattctggagatggcggagtacaaaaaagcaggaacctgcaaggtactgatcgtgacaggctgtatggcgcagcgctataaagaagagatcattgaggagattcctgaggtagacgcagttctgggaaccacctcttatatggatattctgaaagcgatcgatgaagcctgtgagggaagacatttccaggagttccgggatatcaatgaacttccggaggattccggaagaagagttctgactacaggcggccattatggttatctgaagattgccgagggctgcgacaaacactgtacttattgcattattccttctctcaggggaagattccgtagtgttcctcaggagcggctgatcgctcaggcagagcatatggcggaacagggggtaaaagaactgattctggtagctcaggaaactaccatgtacggtacggatctttacggaaaaaagactcttcatcttcttatgaaagagctttgtaagattaagggaattcgctggatccgtgttctttactgttatccggaagaaatttatgatgaactgatccaggttatgaaggaagaaaagaaaatctgtcattatcttgaccttcccattcagcatgccagcgaccggatcctgaaaagaatgggccgccgcacaaccagagcccagctgactgccaccatagaaaagctcagaaaagagattccggatattgttttaagaacaacgctgatcacaggctttccgggagagacagaagaggatcatcaggagctgatggaatttgtggacgaaatggagtttgaccgtctgggagcctttacctattctcctgaggagggcactcctgcagagaccatggaagatcagattcctgaggagataaaagaagaaagacgggatgagatcatggagcttcagcaggagatttctctggaaaagggaaatgaccggatcggtcaggagctgctggtcatgatcgaaggcaaggtgtccggggagagcgcttacattgcaagaacctatggagacgccccgaaggtggacggatatatttttgttcagacaggcgaacttcttatgaccggagactttgcaaaggttcgggtgaccggagccctggaatatgatttgataggagaattggcagatgaatacaccgaataaactgactgttggaagaatgatacttgtgccctttatggttctgtttttactgactgacctgggcggagaggcaaaccgttatatatcccttgttatttttgccggagccagtattacggactggtttgacggttatctggcaaggaaacaccatcttgtaaccaatttcggaaaatttatggacccgctggcagataagcttcttgtgtgctctgccatgatctgtatgatcgagcttggaagacttccggcatggatcgttatcattattattgcaagagaatttattatcagtggattccgtctgatcgcagcagaaaacggagtggtgatcgctgcaaattactggggaaaatttaaaacagtttcccagatgatcatgatcattcttctgattcttcatttcggaggaatttttgcagtactggagcagatctttatctggctgtctctggcgcttaccgttatttcactgatcacttatatatggcagaaccgttctgtcctgtccatgcaggaataaaaacggctgtttcagaatatcggggatacaaaaaggaggctgtaaaagatgattacagaactggtagcagtaggaactgagattttacttggcaatatcgtaaatacaaacagcgcgtatctggcagaaaaatgcgcgcagcttggactttctctgtattatcagaccgttgtgggagataatgagcagagaatgaaggataccattaaaacggcccttgaccgttctgacgttgtgattcttaccggaggcctggggcctacgaaggacgatctgacaaaggagatcacagcggaagttatggggcttcctcttgtggaagacgctcacagcagagagcttctggacgcgtacctgaagcagtacgaaaaaaatgacgctcagcggagaatcacttccaataattataaacaggcaatggtacctcagggagcccttgttctggataatcataacggaaccgctccgggtcttattattgaaaagaacggaaaaacagcaatccttcttccgggacctccaaatgagctgaagcctatgtttgaggaggaggttttcccgtatcttcgtaaaaaacagccggagatcatttattcacagatggtaaaaatctgttccatcggagaaagccaggtggcagaggaaattcaggatctgattgaacagcagtccaaccctaccattgctccttatgcaaagaccggggaagtacatctgagggttacagccaaggcagaaagcgaaaaagagtgcaaaaagctgatcaagccggttgtaagggagctgaaaagccggtttggcaaaaatatttttgcaacagaagaaaaaaagactctggaagaggcagtagtggatatgctgaaagaccagaagcttaccctttctcttgcagagtcctgtacaggcggcgctattgcgtccagaattgtaaacgttcccggcgcctctgaggtatttcttcagggcatggtaacttacagcaaccgtgccaagcggaaaagccttggggtaaaaaaatcaacactgaaaatgcatggcgctgtttctgagaagtgcgccaaggaaatggcaaagggcggctgctttgttacaaaaacagacatctgtctttctgttacgggaattgccggaccggacggcggcacaaaggagaagccggtaggtactgtgttcatgggctgctgttataatggaaagactgttgtccgtgaatatcattttacaggcaaccgggcaaaaatccgggaacagtcaactgcgcatgcgcttgcctttttaagagaatgtattatggagggtgtcagcaaaaaagactgattccctagcggatcattcgcataagacttacaatgcggtcaatttttgcagcttcctgaggggattttcccattttgagaacttccagaacagcggagatttcattagaggaaaaattaagcccgtttccttttccccgggaagctgcatccatcagaaaagggagcatatctgaggcgtttttgcctgttccctgttctgcaagattctgaagcatttccagtttacttttatccatatctgcaagtctggggtcattctgccagtttttgtccataggatctccttttttaattattcgtttaaaatctgaagcatttgtaccaggatcagcatgttggtaagctgatccactttttgccggcttttgccataactgaatctgcggatatcctgaagcatttccaccggatcggcagctgtgttttcgcagatctgcatgtcagcgcgttctggagagaacagcgccattgtgttggataattcctccaatttcgtataaagagaaatgatctgccgtgcagaaggcgggagataaggaacggctgccttgataagctgtgtctggtcgctgcttaccatctggtcaagagcggtctgagaaataagttcctgatccatagtcaagactccttttttattaatatatgattcttcttaaagaatatgtgactgaattttcaggcggaaggtgtgtacctgaaaaatatctgctacatataatatatagaaagcagatcaggaagtgacagaaattgaatgaaaaaaagcagaagctgattctggacggcaatgccttttatgagatagatctggagtgtctgaaacagaaaaaagaaaaagagcacagagaaaaacaaagggctgagcatcagaaaaggcagaggaaataacctctgccttaaaaagaccagatagatcagcagcagccgttattgccgccgcatccgccgcaaagcagaagcaggataacgatgatccagcagcagtcgccattattaccgccgcatccgcctccattgccgccccagctgttgttgccgcagaggcacatgagaatgatgatccagagaatacaactgcaggagctgccgccccacatattgtttatggaagaatttccacatccgcagctgttgccgcagccacaactgttttcacatccgcagccacatctttcttctccgcatccgcagttcgtagcagctaaatcactcattataaaatcctccgaaatttgttttacacttcatcttatgtgaaggggatgtccattgtgacactgtttattgacataaaaaaatattttcagtatactcagtttaaaatattatggagatacaaacgagatgtttctgaagaaaggggagtttatgcatccatatgtaactgtgattctgctcactgtggcagcgattctgctgctggtgacctggatcttatatgaaaacagaaagcagaaaaaaagaatgctgagaaagattcagaggatttacggtaaagtaccggaaagagaatatgctgccggagatctgaaaaatatttctcattacttcctcagaaaaaagggggacgatttctggattgatgacattacctggaatgaccttgatatggacagaatttatatgctgatcaatcagacagtttcttcgccgggagaggatgtcctttacgatatgctgagacgaccggtttttcgccaggaggatattgaccgaagggaaaaactgatccgtttttttgctgaaaataaggaaaaacgggagcagatgcagatccttctgtcaaatgtgggaaaaacctggcatggttcactgtcagataccatactggctctggaggaggcgcctcaggtaaatacaggtcttcactgggttatgtttgtcctgcttattgtaacgcttgtgggtgttctgcccttttatccggcgcctggttttctgctctttgtgcttttaagtacagtgaatgtggtctattattatgcaggaaaagacagacagaggatcggagcttttctggactgcttttccagctttctctgcatgctggaatccgcagagaggatggagacagcggactggcccgagatcagtgaacagatggaatatatccgcaaagggaaaaaggctctttccggattgaaaaaacgtgtgtttttcctcacaggaagaaacgatacctcaggaaatccggcccagctttttctggattatatcaggatgctttttcatgtggatatacttatctataacggaactctgaaaactgtacagggaaaaacacaggagatcatgcttcttcttgacaatatgggagaactggatgcagtcatatccattgcttcgtttcgggagcttcttcctctctggtgcagtccctgcttctgcgaagaaaaaggaaagcatatccgtcttctggcagaggatctttatcatcctcttatacaggaaccggtagccaataccattgagacagaggggagcgttcttgtgacaggctccaatgcatccggtaaatctacgttcctgaagaatgttgccattaacagtattcttgcccagacagttcttacctgtacctgctctcattatgaagcgccttttttgaaggtgatgacttccatggctcttcgggatgatctttccggaggggaaagctattttattgtggagatccggtcactgaaaaggatccttgatgaaagcagaaaacaggaacctcttctgtgcattatcgacgaggttttaagaggaaccaataccattgagcgcattgccgcttcctcccggatactcagcgctctgaaccgggactggattcttccttttgcggccacgcatgatattgagctgtcatatattctggacaggcagtaccggaactatcattttgaggaggaggtacaggagcatgaggttctgttccattatcttctgaaaaaaggcagagccaccagcaggaatgccataaagctgctttccatgctggagtatgatccggtcattgtaaaaggagcagaagaggcggcggcagattttgagcagacaggagtatggaaaccctgtgtgaaagaaggaagataaaggggatgacagttttatgcaagagctgggattgtatgatatacattgccacatagttcccggtgtggatgacggggcggtaaacctggaggaagctgtaaaaatggtagaagcccagtataaacaggggattcgtacaattattgcaacgcctcattttcgtaagggaatgtttgaaccttctgcttcagaagtaaaaaaacagtttcagattttaagaaaaaccgtatgggagatcaataaggatatgcggctttatctgggaagtgaattgtatgccagtgaaaatatgatctctcagataaaggataaacgtgtgatgcctatggccggctctaattatgtgctgacagaattgtatgaagctatcactgcttctcaggtgcgggcatatctgggaatactgatttctaaaggatatcgtccagtgatcgctcatgcagaacgatatggatgtatgagaaatgatattaattttatagaagatatgattgaaatgggagcatatatccagctgaatgctgacagtgtgatcgggaaagagggatttgccttaaaaagattttgcaaaaaacttttgaaaagcggaaatgtccattttgtaggttcagactgtcatggaataaaaagaaggccgtccagaatcggagaggcttatgtttatatctgcaggaaattcggacaagagtacgcagatgaaatttttatttataatccccgcaggatactggaggacgcacggcaaaaacgagcgggtacaaagaaaatcgtataggatcaggaggcagatatgcaggtaaaaatttatacagacggagcggcaagaggaaacccggacggaccgggaggctatggagcaattctccattatgtggatacaaaagggcagcttcatgaaagagagctgtccagaggctataaaaaaacgacaaacaaccggatggagctgatggcggctattgcggcgctggaggctttgacaaagccttgtcaggtggatctttattcagactccaaatatctggtggatgcgtttaatcagcactggatcgactcctggctgaaaaagaactggaagcgggggaaaaacgaggatgtaaaaaatgtggatctgtggaagcgccttctgaaggtaaaagagctccatcaggttacctttcactgggtaaagggacatgcggatcatcctcagaacgaacgctgcgatcagcttgccacatccgcggcagacggcacggagctgtatgaagatgagggactgaaggggtgaagcagtaagttttttgcttattgttcatttggcattctgacctgtatgtttcgggatagtaagctgtaaacagtaacctttattactttaagttgataaactggtctcaatccctcttgacaaataaaaaggggctttgtatacttttagaagtatatgaaacggcttggaagagaacaagtagcttcagggaagcacacagagagctgccggagggtgagaggcgcgtgcggaacttttgtgaatacatctcggagctctgcaccgaaccggactgtttgagaacaggcaagtaggctgcagcggagcggcacacgttatcgtgctcaatgaggcaggaaaaatgcaatttcctgtgaatttaggtggtaacacgggacccggttctcgtcctaaaaggacaggaaccgggcttttttataacaggaggaaaagaaatatgacagtttgggaagaactgcaggcaagaggactgattgcccaggtaacaaacgaagatgagatcaaagaaatggtaaataatggaaaagccactttttatattggctttgaccccactgcagacagccttcatgtaggacactttatggcgctttgcctgatgaagcgtcttcagatggcaggaaaccgtcccatcgcacttcttggcggcggaaccggaatgatcggtgatccctccggaagaaccgatatgcgtcagatgatgacaaaggaaacaattcagcataatatcgactgcttcaaaaaacagatggagcgttttattgatttttctgatggaaaagctcttatggtcaataatgcagactggctgatggatctgaactacgtggaacttctccgtgaagtgggagctcatttttccgtaaaccgtatgcttacggcagagtgctataagcagcgtatggaaagaggcctaagcttcctggagtttaactacatgatcatgcagagctatgacttctacatgctgttccagaagtacggctgcaacatgcagtttggaggagacgatcagtggagtaatatgcttggcggaacagaactgatcagaagaaagcttggcaaggatgcacatgctatgaccattactcttcttctgaattcagagggcaaaaaaatgggcaagactcagtccggcgctgtatggcttgatccgaacaagacttctccttttgatttttatcagtactggagaaatgtggatgacgcggatgtgatcaaatgtatgcgccttcttaccttccttcccatcgagcagatcgaggagatggcagcctgggaaggaagccagctgaatcaggcaaaagaaattcttgcttacgagcttactaatctggttcatggcgaggaagaggcgaagaaagcccaggaaggcgccagagctctttttgcaggcggagccaatacagataatatgccgtccacagagcttaccgatgaagatttccaggaaggaagcattgatctgatcaccatgctggtaaagacaggtctggttcccacccgttcagagggacgccgtgccattgagcagggaggagtatctcttgacggtgaaaaaattacagatatcaaacacacagtttccaaagatgcttttggagaggaaggccttgtgctgaaacgaggcaaaaagaaattccacaaggtgtgtgtgaaatagaggaggaaacgacaatgaaaaaatacggagtaaatgaacttcgtcagatgttcctggattttatggaaagcaagggacatctggttatgaagagcttttctctggttccccagggagataagagccttcttctgatcaatgcaggtatggctcctttaaagccatattttaccggagcagagattccgcccagaacaagagtggcaacctgccagaaatgcatccgtaccggcgatatcgaaaacgtgggaaaaactgcccgccacggtactttctttgagatgctcggaaacttttcctttggcgattattttaaacatgaagccattgcatggtcctgggagttcctgacaaaggttgtgggacttgatccggagcgcctgtatccgtccgtatatctggaggatgacgaggcttttgagatctggaataaagagatcggtattccggctgagcgtattttccgttttggaaaagaggataacttctgggagcacggcgcaggcccctgcggtccatgctctgagatttattatgaccgcggtgaaaaatacggctgcggcaaaccggactgtaccgtaggctgcgagtgcgaccgttatatcgaagtgtggaacaatgtatttactcagtttgaaaatgacggaaacggcaattacgaaacacttcagaataaaaatattgatacaggaatgggacttgaacgactggcggttgttgttcaggatgtggattccatttttgatgtagataccatctgttctcttcgtaatcttgtatgccaggttgctggtaaggaatatggaaaagattatcagacagatgtttccatccgtctgatcacagaccatatccgttccgctacttttatgatctctgacggtatcatgcctaccaatgaaggccggggctatgtccttcgccgtctgatccgacgtgcagcccgccacggccgtcttctgggtattgagggaaccttccttgcaaaattaagcgcagaggtgatttccggttccaaagacggttatccggagcttgaggataaaaaagaatttatcttcaaggtactgacaaatgaagaaaaccagtttaacaaaaccatcgaccagggacttcgcatccttgctgatatggaagaggagatgaaggcagcaggagccagagagctttccggcgaaaatgcattcaagctttatgatacttacggattccctcttgatctgacaaaagagattctggaagaaaagggatacggaatcgacgaggatggcttccaggcggcaatggaagagcagagagtcaaggctcgtactgcccgcgaagtaaccaactacatgggtgcggacgctacggtttatgatgagatcgatccttctgtgacaacagaatttgtaggctatgagcatctgacttttgaatctcaggttactgttctggcgggagaaagcgagcttgcctcttctctggtagagggacagaagggaactgtttttgtaaaagagactccgttttatgctaccatgggaggccaggaaggcgataccggtgtgatcgagactgcaaacggtaaatttgtggtagaagataccatcaaactccgcggaggaaaattcggtcatgtgggacatatggaatccggtatgatctcagagggagagactgtttctctgaaggttgcagaaagcagacgccgcgatacagagaagaaccacagcgcaacccatcttctgcagaaagctttaaaaacagtactgggctctcatgtagaacagaaaggttctcttgtgactccggacagacttcgttttgactttgctcatttccaggcaatgacagaggaagaacttgaaaaaacagaagctcttgtaaatcaggagatccaggcagctcttccggtagaaactgctgtcatggacattgaggaagcaaaaaaatcaggagctatggctctgttcggcgaaaagtacgatcagaaggtccgtgtagtttccatgggagatttctcaaaagaactctgcggcggtactcatgtaaaaaatacttcctctatcatgctctttaagattgtttctgaggcaggtgttgccgcaggcgtgcgccgtattgaggctcttaccggaaatgcggtcgtggattattataagaagcaggaaaatatgctgaaggaagctgcaaaagcattaaaaacacagccggctgaggtgacagaaaagatcactcatatgcaggcggacataaaagtgcttcacagtgaaaatgaatctctgaaaagcaagcttgcacagggatcacttggcgatgttatggatcaggttgcggaagtaaaaggcgtgaagcttctggcagccaaagtggagggcgttgacatgaacggtctccgtgatctgggagatcagctgaaagagaagctgggcgagggtgttgttgtcctggcggcagtaaacggcgcgaaggtaaacttccttgccatggctacagatgcagctcagaaggcaggcgctcatgcaggaaatctgatcaagggcgttgcagctatcgcaggcggtggcggcggcggtcgtccgaatatggctcaggccggcggaaagaacccggaaaaggctcaggaagccattgacgcagctgccggaatcctggagcagcagctggcctaagcttctgcggtaaatccctgcaaaaatattgcaaaatattttgcaaaaatatccaaaagctgttgacgaaccttaaggctatgatatataatataactcgtgcaagaaaaatacccagacagttgtattttagcacaatctacaactggagggaggttaggtgtgagtctatgtcaaacgttatcgtaaaagaaaacgagactttagatagcgctcttcgcagattcaagagaagctgtgcaaaagcaggtatccagcaggaaatccgcaaaagagagcattacgagaaaccaagcgttcgtcgtaagaaaaaatctgaagccgcaagaaaacgtaaatataattaattgtgcgcaaaaatccctggctgtatagtcagggatttttaaaaactctaattgttactttattaacaacattacagaaaaagtgaagtgaagctatgaacctgattatcatgcccctgaaaaaaatggcaaagcttttatttaacaggattttttatgtggcggtagccctgcttcttcagcttgtatgggtgtttctttttgtgtgggaactggcaggttattctcagtatatttcccttgccattacagtacttagtattgtgatggtgctgtggatcctgaataaaagaatcaatccttcttataagctgggctggacaatgctgatcatggcgtttcctgttttcggactgcttttatacctgctgttcggacattccaggatcgcggaggaaatgcagaaacgttatacccgggtccaggaggacagtattccttatcttcagtcagatccccgggtctgcaggaaaatacaggaggaggatccgtctgcggcagtccagtcggaatatatctgccgtcattccgtgtatcctgtgtatgaacatacaaaggcggaatattttcaggtaggcgatgacatgtttcctgtgctggtgaaagaactggaacaggcagagcattatatttatattgaatattttattattaatgacggcgttatgtggaggacgattctggatattctggaacagaaagccgctcagggagtggatgtacgcctgatctatgacggatttggctgtcttactacgctgccctacaaatacgataaattcctgcgggaaaaaggaatccagtgcaaagtatttaaccctttccgcccggtgttaaatattatccagaataacagagatcacagaaagatctgtgtcattgacggaaagacaggctttacaggaggaatcaatctggcagatgaatatattaaccagaaggaacgcttcggccactggaaggatacggcggtaatgctgaaaggcgatgccgtgtggagtatgaccatgatgtttcttcatatgtggaatgtggtaaacggcattcagacacctattgattacgctgcccattcaccccacgcctatcatccggaagagtttgagggaagcggatttgtacagccctttacagatactcctcttgacggggagacactgggagaaaatgtttatctgaatattatcaaccgggcaaagcgttatgtgtatatctgtacgccttatctgatcattgacaatgaaatgatgacagctctctgccttgctgcaaaaagcggagtagatgtgcggatcatgactccgggagtgccggataaaaaaatggtattccttcttacccagtcttattatgcgcagctgatagaagccggtgtaaaaatttatgaataccagcccggattccttcatgccaagtcttttgtctgtgatgatgaaattgctgtggtgggaaccattaatctggattaccgaagtctttatctgcattttgaagatggcgtatggatctacaaaaacgacgtgatccgggatattcttgaggattttctggaaaccatgcattactgtgatcctatcagtcttgaattctgcaaaaacagaaatatatttgtgcggggatttcagagtattctccgtgtattcgcgcctcttctgtgatttttgaagaagcagtcatattttcgggtttctccttttagaatagaataaaacacccaaacgggaggttttctatgactaaaaaacggaggaaccttttttgtgcccggatactttgcgcaagtatccttttttcgttggcagcgccggtatctgcggaagaaactgcctctgcagtttctgtggaggctccggaatatgtgctgatggagccggaaacagggacggtgatcctggaaaaagacaaagatgttccaagaagtcccgccagtgttacaaaggttatgactcttcttcttatttttgaagaaatagaaaaaggaaatctgaaactggatgacacggttataacaagcgctcatgccaaatctatgggaggctcccaggtttttctggaggaaggagaaacccagacggtggagaccatgatcaaatgtattgtgatcgcttccggaaatgatgccagcgtggctatggcagaacatattgcaggcagcgaaccggagtttgtaaatgcaatgaataaaaaggcgcaggctctgggcatgaaaaacacgcattttgtggactgctgcgggctgacagattctgacgatcattataccactgcctacgacattgcgctgatgagcagagaactgatccgtaagtatccggaaatcctgaactattcttccgtgtggatggatacgatcacacacaatacaaggcagggttccaaggagttcgggctgtctaataccaacaggctgatccgtacatatgaaggctgtgtgggactgaaaacaggcagcacaagcaaagcaaaattctgtgtttctgctgtggcaaaaagaaaagggatcactctgatcgctgtagttatggctgctccggattccaggacaagagtgaaggatgcctcaatgctttttgattacggatttgcaaaatgcagtctttatacagacgaaaatccggggaagcttccagatctgaaagtgataaaaggcataaaagaaaaaacaactctgacttttggaaaaaccttccgctgtctgagtacagacggaacaacttttgataaaataaaaaagaagctgattcttccaaatgaagtaaaggcgcctgtaaaaaagggacaaaaagcaggagagcttgtctattatcaggagaacagagagcttggaaggattcctgtgatctatgcagaaaacgtgaaaaaggccggatatctggaccggctgaaacagacggcggaggaattctgcctgtgaaaagataccggatatcatactgtggctgaaggttactgttcacaggtactattccgccaggtgttttggaatgcattttggccaggttactgcaaacggagtgagcattgggatgtttgcctgaaagaactttccggcatctgacaattcttttgacaagaaggatggctggggggtataataaattccaaataggttacagactgaacagaaatatgagaggaataaagataaaatgaaagagatcaggactgaggaagcagtagggcatgtgctttgccatgatattacccagattatcaaagacgaaaaaaaaggcgtgctatttaaaaagggccatgtagtaaaagaagaggatataccggcgcttctgtcagtgggaaaagagcatctttttgtatgggaaaaacaggagggaatccttcacgaaaacgaaggggcggagattctgtatgaaatctgcgccggcagacatatgcacggaacagaggtaaaagaaggcaaaatagaagtgatcgctgactgcgacggtcttctgaagatcaacagagctgctcttcttggcgtaaacagtctcggagagatgatgatcgcttccagacacggggattttccggtaaaaaagggagataaaatcgcaggaacaagaattattcctcttgtgatcgaaaaggaaaaaatggacagagcccgggagactgcaggccgcgaaccgatttttaatatcctgcctttccgggaaaaaaaggtggggatcgtaacgacaggaagtgaagtgaaaaagggactgatccaggatacctttactcctgttctgagagaaaagcttgcagaatattcctgccaggttatggggcagacaacgccgggagatgaaaaggatcagattacaggggatatcctgaagtttattgaaaatggagcggatatggtgatctgcagcggcggaatgagcgtggatccggatgacagaactccgggagccatccgcgctaccggtgcggaggtcgtaacctatggagctccggttcttccgggagccatgcttcttcttgcctattacagaaaaggggaaaaaaccatcccgatcctgggtcttccgggctgcgtgatgtatgcaaaaagaactgtgttcgatctggttctgccgagaatcgtggcagacgattctgtccgcagggaagaaattgcagcctatggggagggcggactttgcctgaactgcagagtatgtactttccctaactgtggattcggaaaataaaagcagtcagaggagcagaatgaaaacattcataacaaaaacctatcagataaaaacagaaaagctgaaaggcggtcatccggtacgttttgctgtcctggcagatcttcacgggcttgtatttggaaatgagaatcaggatctgtttcatgcaattgaaaaaagcggagccgatgcagcgcttgttgtgggagacatggttgtgagagcggatgtgtctacggtttcggcagttaccggatttttgtgcagactggcaaacagaatccctgttttttatgctcttggaaaccatgagtatgaaatgctgctgaacccggatacgtccgcagaatatcttacttatgagcatgtgcttaccaatgccggcgtgtgctttcttcataatgagcatgtgtgcatgaatatcagaggaacagagtttaccttttacggactggagcttccggaagaatattatcggaagcctttttctccatatcctgacagacaggatatgagagaattggttggaaaaccttcaggagacgggatttctgtgcttcttgcccataatccgaaatatggagacgtatattttgagtggggagcagactttattttttccgggcattatcacgggggaatcttgagatttaatgaacatcacggacttacctgtccccagtatcttttgtttcctctatattgctgcggggattttcacagacaggagcagcatatgatcgtcagcgccggtctgggagagcataccattcctgtgcgtattcataatcccagagaactgatccttgcagagcttgttccggacgaaggcgggccaggcggaaatactgcgcagaaaacaggaggggacagctgaaatggccatacccataaagataaatgtatttgaaggaccgctggatcttcttcttcatctgatcgaaaagaataaaattgatatttatgatattcctattgtggagatcacggatcagtacatggagtacattcatggaatggaaacagaggatctgggcactatgagcgaattccttgtaatggcagctacgcttctggatatcaagtgtaaaatgctgctgccccgtcaggtcaatgaagaaggggaagaggaggatcccagagaggagcttgttcagaagcttctggaatacaagatgtacaaatatatgtcctatgaactgaaggacaaaatggatggagcggcaggcgtgttttttaaaaagcccaccataccggatgaagtgatgaaatacagagaaccggtggatcctcaggcgcttctggcatctctgacgctggaaaagctgaatcagatctacaaatccattctgaaaaaacaggaatcgaaaatcgatcccatccgaagtaaattcggtaccattgaaaaagaagaggtcagcctttctgataaaatgctggaaatgaaagcatatgcggcagaaaacagacgtttcagctttcgggggcttctgcaaggccagacctccaaaatccaggtgatcgttacatttctgtctatcctggaattgatgaaaatgggatacgttcatgtaaaacaggaagagctgtttgacgacatccaggtggaggtaaaagaggatcctgatacctggaagaacctgacagaatttgcggacgaataggggaataaggagaaatatggaaataaaaagaacagaggcagccattgaggccatcctttttgccatgggggaatctgtggagctttcccggattgccgctgcggtagggcaggacaaggatactacccgcaggctgctgcatcacatgatggaccggtatcaggaggaggacagggggatccagatcatagagctggaacagtcctatcagatgtgcacgaaaaaagagtattatgagaacctgatccagatcgccctgcatccccaaaagccggttcttacggatgttatgctggaaacactttcgatcattgcctataaacagcctgtgacaaaggcggaaatagaaaagatccgcggagtgaaatgcgatcatgccattaataagctgatggaatatgagcttgtcagagagcttggaaggctggacgcgccgggacgtccgattcttcttggtacaacagaagaatttctgcgttctttcggggtgcaggctcttgatgagcttccggttatggatccggtacagctggaagatttcaaggcggaagcagaagaggaaatccagttaaagctggacgtataaggaggaaggatgaaatgccaaccacatacacacacgatttatttggaaaaaaggtttacagacagcttccggaggaaattcgaaaagtgatacgggaaaacggaaatctttttcggatcggccttcatggaccggatattctgttttatgacctgttcaatcaaaaggtctgcggtctgggaacggaaatgcacaagatacctgcagcttcgttttttttaagagggatgagcattgtaagaagaacaggagacgagaggcttctggcttatcttctgggatttgcctgtcactatcttctggacagctcctgtcatccttttgtggatgaaacggctgaaaagaagattctttctcacacgcttctggaaaaagaatttgacagaacactgatggtggaaacgaacaggaatcctcatcattattatccgtcagactgtattgtgcccaggatggattatgcaaaagttatacactgcatgtttcctgagattacagcaaagaatattttcctttctctgaagatgatgaaatttcttaccaatgcaatggtttacaataattccggaaaacgaaggcttttggcggccattgtcacaaggatcgcaggacggaagcggtctgcggctgtccttgaatattttatggaaaaggatccggttccggggtcagaagctcctgtaaaggagctgcatcagtattttgatcaggcggtacgggaagcgcctgcgtacattgaggaactgttccgtttatccagagagaagagaatgctttcagagagatggaaccgcacctacaacggatagatgcagggaaaacacagcctgctggataaacagggagctgagacagaggaaaagcagaataaagcggacatgtatgcataaacttatcctataagcataaaaaggcggggatgaatatgagacatgctgcattacttctgctgacatctgtctttctttttggggagtttgcttttggttctcaggctgttgcggctgagacagtctgtgaaaatacagaaaaggaagcggcagattctccgggcagcctttacgctctttcagctgttctgatggatggagagtccgggcgtattctttatgaaaaagacggggaaacacccaggcccaatgccagtaccacaaaagtaatgacctgtattctggctctggaaaacggggcaggcgacgattacgttatggtgtcagataaggcggcggcgcagccggatgtacagcttggcatgagggagggagagcagtattatctggaagaccttctgtattctcttatgctgatgagccacaacgatacagcggtagccatagcggaacatatcgggggaagcacggaaggctttgccgggatgatgaatgaaaaagcaaaagagatcggatgtacggatacgtattttattacgcccaacggtctggatgcagaagatgaaaagggagtgcatcatacaactgccagagatctggctttgatcatgcgctatgccatcagaagcgaaacctttttaaagatcacccagacccgggaatattcgtttacagatctcgatgaaaaaagagaattttctgttcacaatacaaacgctctgcttactatgactgacggggttctttccggaaaaacaggatttacaggggacgcgggatattgttatgtgtgcgcctgcgaaaaagatgaaaagacttttgtggtgtcccttctgggatgtggctggccaaacaacaaaggatataagtggaaggattctttgaagcttctggattacggggaagataattttgattatgagaagttctggaaagaactgaagtttccggaagtaccggtgaaagacggagtggaaaaaaacattacctttggggacacggctgttgtaagcgggattccgtctgtttccgaaaaagaaaagaataaaaaaatacttatgaaaaaaggtgaaaagatcagctgccgcctggagatgccggaaaagcttcaggcgccggtaaaaaaaggaaacaggatcggaactcttatttacagcctgggagaagaggaactggcttcttatccggtgctggctgaccggaatgtggaaaaggtttcttatggctggtgtgtggaccaggtgtttcatgatttttttcactgaatatcagttataggaatatccggaattttgctgaaggggaaattcccggctttggtgcaccatgtaccacaggccgggagtttttttgagagaagaggttaaaattttaacaaaaacgtattaccctattgaaaaatttagaaaaaaaggttacaattataatcggctgaaattttggttatacttaaaattcttataaaatggagggcaaacgagaatgagtaacgcaacaccaagtttagcaggcacaagaatcacttctttgcttgacgcgaacagttttgttgaaatcggaaaaagtgttacagcaagatccactgattttaacatgactgaaacaaaagcaccttcagacggtgtgatcaccggctctggtgtgatcgacggaaatcttgtctatgtttacagccaggacgcttctgttctgaacggaaccgttggagaaatgcatgcaaagaaaatttccgcactgtatgaccttgcaatgaaaacaggcgcaccggtaatcggtcttgttgactgtgcaggtctgagactccaggaggctacagacgctctggaagcttttggttccatttacctgaagcagacactggcatccggaatgatcccgcagatcacagcgattttcggcacctgcggaggcggtatggccgttgttccggcactgacggattttacttttatggaagcaaaaaaaggtaaaatgtttgtaaatactccaaatgcgctggaaggcaatcatgtggacaaatgtgatacagcatctgctgatttccagagccaggagacaggtcttattgacggtacaggaacagaggaagagatccttggtcagatccgtcagcttgtaagcctgcttccttccaactttgaggacaatgattcttttgtagaatgtgcagatgatctgaaccgtacctgtgatgatctggctgcatgtgcaggagatacttcccttgcactttccagaatcgcagatgagggacttttctttgaaacaaagaaaaattacggaaaagatgttgttacaggcttccttcgtctgaacggagcaactgtaggtgctgtggcaaacagaacagagatctacaacgaagaaggcgaaaaaacagaagaatttgacggcaccatctctgcaagaggcgcaagaaaggcagcagcctttgtaaaattctgcgacgcttttgatatcccggttctgacacttaccaatgtgaccggatttaaggcaactctctgcaacgaaaaaatgatggcagcatccatcggtgagatggttcgtgcttttgcagatgcaactgtaccgaaggtaaacgtagtgatcggcaaagcttacggaaccgcatatgttgccatgaacagcaaatctgtaggcgcggatcttgtgtatgcatgggacagcgcagaaatcggtatgatggacgcttctctggcagctaagatcatgtatccgggcgcagatgctgcctctcttaatgaaaaggcagcagagtacagaaaccttcagtcaggtgtggaatctgcagcggcaagaggctatgtagatactgtgatcgctccggctgataccagaaaatatgtgatcggagcttttgaaatgctgttcacaaaaagagaagaccgtccggctaaaaagcacagcgcagtctaagtgaggtgagcatatgaatcagatgttaaaaaaagcatcctctgtctgcgcagcagcagtgtgcgccgcatcacttatgttttccggcgcttccgttgtaatggctggcagtgagatcgacgaggaaatcatgactcagatcaccatgactgcagagggactgactcagacgatcattccgctcagtgatgaagaaattgaggcatatctggaatccggtgacgaatttaccgagggagccatgaccgcatgggatgacgccagggatgaagtaggtgaactgaaagaggccggaaaggccgaggtggagttttccaatcatcagtatactgccacagttccggtggattttgaaaagctggatgcaaaatttgtatatgtatttgaggacgtggaaggtgtgctgacacctgtttctgcttctgtagacgttcagtacccgttatccacaaccatgaaaaatgccggattgaatacagttatgggacttggaatcgtatttgtgatcctggttcttctgatctttattatttctcttttcaaatttattccgggttcaccggcagctgcaaaaaaagagaaaaaagaagaagctccggtaccggcacctgccgctgttccggttcaggaaacagtgcaggcagctgatgatacagaactgatcgcagttatcgcagcagcgatcgcggccgcagagggaaccacaacagacggatttgtcgtgcgttctatccgcaaaatcaaccgcccaagaagataattgacaattaggaggattataaaatgaaaagttatacaattactgtaaacggaactgcatatgaagtaactgtagaggaaactggaagtgctgctgcaccggctccggcagcaagagcagcagctcctgctgcacctaaggctgcaccggcacccgctccgaaagcagcagctcctgcagctggtgcaggcgctgtaaaagtgacagcatctgtaccgggaaaagttcttaagatcgttgcatctgctggacaggcagtaaaagcaggcgacagcatcgtgatcctggagtccatgaaaatggaaattcctgtagttgcacctcaggacggtacagttgcaagcattgatacaacagaaggtgcttccgtagagaacggagataccctggctactatgaactaagacgggaggtattcagatgtcttatgtaacagaaaccctgtctaacctgattcatcagacagccttctttaatcttacctggggcaactatctgatgatcgcggtggcatgcgtattcttattccttgctatcaagaagggatttgaaccgcttcttcttgttcctatcgcttttggtatgcttctggtaaatatttatccggatattatggctcgtccggaggatatgtcaaacggagtaggcggacttcttcactatttctacctgcttgatgaatggagtattcttccgtccctgatcttcatgggcgtaggagccatgacagacttcggtccgctgatcgcaaacccgaagagcttccttctcggcgctgcggctcagcttggtatttatgttgcatacttccttgcgatcttcatgggattcaatggaaaggcagcagcagcaatctccattatcggcggtgctgacggcccgacttctatcttccttgcaggaaagcttggacagactgccctgatgggaccgattgcggtggcggcatattcctatatgtctcttgttcccatcattcagcctccgatcatgaagctctgtacaacagagaaagagcgtaagatcaaaatggaccagcttcgtccggtcagcaggctggagaaaatcctcttcccgatcgtgatcactatcgtagtatgcctgatccttcctacaacagctccgctggtaggtatgctgatgcttggtaacctgttccgtgagtccggcgttgtaaaacagctgacagagacagcttccaatgcgctgatgtacatcgtagttattcttctgggtacttccgtaggtgcttccacaagcgctgaggcattcctgaacctggatactctgaagatcgtagctcttggtcttgttgcctttgctttcggtacctttggcggtgttatgcttggaaaactgatgtgcaagctttccggcggaaagatcaatcctctgatcggctccgcaggtgtatccgcagttccgatggcggcccgtgtatctcagaaggttggcgctgaggcagatcctaccaacttccttctgatgcatgctatgggaccaaacgttgccggtgttatcggtacagccgtggcagccggaacctttatggctattttcggtgtctgatctgttgtgacagacagatgcctgtaaccgtcagatatattgaatttccttgtgaaaactgattaaaggagaataaataatggcagaattagaaaaaaaacctgttaaaatcgtggaaactgttctgcgtgatgcgcatcagtctctgatcgcaacaagactcagcacagagcagatgcttcctatcgttgataaaatggacaaagtaggctaccatgcagtagagtgctggggcggcgctacttttgatgcttctcttcgtttcctgaaggaagatccatgggaaagacttcgtaaattccgtgacggcttcaaaaacacaaagcttcagatgctgttccgcggacagaatatcctcggataccgtccttatgcagatgatgtggtagagtattttgtacagaaatctgcagcaaacggaattgatatcatccgtatttttgactgcctcaacgacatgcgtaacctgaaaaccgcagttaaggctgcaaacaaagaaaaagctcatgctcaggttgctctttcctatactcttggcgatgcttatactctggaatactggacaaacattgcaaaagagatcgaggaaatgggcgcagattctatctgtatcaaggatatggcaggacttcttcttccgtatcaggctacagagcttgtaggcgctctgaaagacgcagttaagattccgatcgacctgcatacacactatacctccggtgttgcttccatgacctatatgaaggcagtagaggccggcgtagatatcattgatactgcaatctctccgtttgctctgggtacttctcagccggcaacagaggttatggttgagacctttaagggtactccttacgatacaggctttgatcagcagctccttgctgagatcgctgactacttccgtccgatccgtgacgaggctctggacagcggccttctgaatccgaagaaccttggcgtaaacatcaagactcttctgtatcaggtaccgggcggtatgctttccaacctgacttcccagctgaaagagcagcatgcggaagacaagttctacgatgttcttgaagaggttccgagagttcgtaaagaccttggcgagccgcctctggttactccttcttcacagatcgttggtacacaggctgtattcaatgttcttatgggcgagagatataagatggttacaaaagaaacaaaggatatcttaagcggtaaatacggcgctactgtaaaaccgtttaatgaggacgttcagaaaaaatgtatcggagatactcagccgatcacctgccgtccggcagacctcctggacaacgagcttgacaaactggaaggcgagatggcacagtacaagaaacaggacgaggacgtactttcctacgcactgttcccacaggttgctactgagttcttcaagtaccgtcaggcacaggagacaaaggtggacgagacagcagcggacacaaaaaacggagcttatccggtataaggtttttataaaagaaaagtcagggggctgtgcaggaaaaactgtacagccctttgctgcatgaaaggataaggatgaaaaacagagtcataattgttggcggaggcgcagcgggaatgctggcgtcgatttttgcagctaaaaaaggctgtgaggtcacactctttgaaaaaaatgaaaaacttggcaaaaagctgtatattacaggaaaagggcgctgcaatgtgaccaataactgtgatccggaagaacttttaaacagcgttgtaacaaatgccaagttcttatacagtgccttttatacctttaccagtcaggatatgatggaatttctggaggaagcgggcacggctcttaaaacagagcggggaaaccgcgtttttccctgttccgatcactcgtccgatgtgatccgggcactggagcgtcagatgaaaaaatacggagttcgcatccatctaaaaagccaggtagagcggctgcttctggaagagggaacggcggcagggatcattctgacagacggcagcgttcacagggcagaagcggttattgtggcaacgggaggtctttcctatcccacaaccggttctacaggagacggatatcgttttgcccgggaggcggggcatactgtgaccgatttagccccctctctggttcctcttcgtacaaaagaagagtatattccggaaatggcaggtctttccctgaaaaatgtggagctgaccgtgaaaaacggaaaaaaagtcctttacagggattttggggagatgatgtttactcattccggaattacgggacctctggttctttctgccagcgccagactgggcacggccctcagaaaatcaggagagctttcggcttttctggatctgaagcctgcgcttacgccggagcagctggatgccagaatactgagagagtttgaatccggaaagaataagcagtttaaaaatgtgatcatcgttctgtttccctcctctctgacaccggttatgctgaagatcggagggatttctccggaaaaacccattcatgagatttccagagaggaacgcctccggttcggtgctcttgtaaaagcatttccctttaccatcaatggtttcggagaatttaaagaggctgttatcaccagagggggagtttctgtaaaagagatcaatcctgcaactatggaatcaaagaaaatacaggatctttattttgtgggagaggtgcttgacctggatgcggtgacaggaggctataatcttcagatcgcatggtcaactgcctaccttgcagctatggctgtatgcggagaataaaggaggacaatgaaatgatctataatattgccattgacggcccggcaggagccggaaaaagtacgattgccaaaaaggttgccggagagctttcctgtgtgtatgtagatacaggtgccatgtacagggcaatggctctttaccttcttcgccggaatgtaaacagagaaaatccggatgagatcggagaggcctgccagggagcggaaatatccatagagtataaaaacggagaacagatcgttcttttaaacggggagaacgtgaatccgtttctcaggaaagaagaggtaggcaatatggcttctgtaagctctgcaaatccaagggtgagggaaaagcttcttgaccttcagaggaagcttgccgcttccatgaacgtggttatggatggaagagatatcggtactacgatccttcccaatgcagaggtgaagatctatctgactgccagctcttttacaagagcaaagcgccgttatctggagctccaggaaaaaggcctgtgctgtgacctggaagaggtcagaaaagatattgaagagcgtgacagtcgtgatatgaacagggaaatttctccccttaagcaggctgaggatgcggttctggtagattcctctgaaatgaccattgaggaagtggtaaaacgtattttacagatttttcatgaaaaagtgatattatcagacgaggttggaaaaaatgaaagttaagaccgcaaaaacagccggcttctgctttggtgtaaaaagagcggtggacaaggtgtacgagcttattgagaacggagtttcgcctatttatacgctgggtccgatcatccataatgaagaggttgtgtcggattttgaaaaaaaaggcgttaccgtgatctcggaagaggacattccgaagcttcgtgaagggacggttgtgatccgttcccacggcgtgggccgcaggatttatgatatgctgaagactgcgggaatttccttcgtagacgtaacctgtccttttgttctgaagatacacaggatcgtggaacgggaaagcagggccggaaaacagattatcatatttggagatccttcccacccggaggtaaaagggatctgcggatggtgcgagggttcctgtactgttctcagaaacagagaggatgcagaaaattttgtcccggatccggggcgaataccctgcattgtttcgcagacgacatttaattacaacaaatttaaagaattagttgaaattctctgcaaaaagaggtatgataataatgttttaaatattgacaatattttaaacactatttgtaatgctaccgaagaacggcagaaagaagcacagtccatagccggagaggtagacactatgcttgtcatcggcggcagacatagttccaatactcaaaagctgtttgaaatatgtaaagaggaatgtgaaaatacttactatatacaaacacctgtagacttggattctgaaatgttccatcacagtagttatgtaggtattacagcaggggcatccaccccaaagaaaattattgaggaggttcaagaacatgtcagaattaagttttgaacagatgctggaagattccgtaaaaactatcagaaatggagagatcgtgcagggtactgtcatcgacgtaaaagaggatgagattatcctgaatatcggctataaagcagacggtattatcaccaggagcgagtattccaacgacagctcccttgtacttgcagacgttgtacacgtaggtgacacaatggaagccaaggttcttaaagtgaacgacggtgaaggtcaggttatcctgacatacaagagacttgctgctgaaaaaggcaacaaacgtctggaagctgcattcgagtctcaggaagtcctgaaagcgcctgtaactcaggtactggacggaggtctttgtgtaaacgttgaggaagcaagagtatttattcctgcaagccttgtatctgatacttacgagagagatctgtccaaatatgcagatcaggagattgaatttgttatcacagagttcaatccgagaagacgccgcattatcggtaaccgtaaacagcttcttcttgcagaaaaagctgagaagcagaaagagcttatggagagaatccatgcaggcgatactgtaacaggtgttgttaagaatgtaacagattttggtgcattcatcgatcttggcggagctgacggtcttcttcatatttccgaaatgtcctggggcagagtagagaatccgaagaaggtatttactgttggtgaagaagttaaagttctgatcaaagagatcaacggagataagattgctctttctctgaaattcccggaagaaaatccgtggctgactgctgctgagaaatttgcagtaggcaacgtagtagaaggaaaagttgcacgtatgacagatttcggtgctttcgtagagcttgcacctggaatcgacgcactgcttcatgtttctcagatttccagagagcatgttgccaaaccgtctgacgtactttccatcggccaggaaattcaggcaaaggttgttgatttcaacggcgaagacaaaaagattagcctcagtatgaaagctctggaagctccggctgcagaggaagcagaaggcgaagaggcataagaagaactgctttgtcagtctgaatacagaagataaactgaattaacaaaaaggatcattacagttatgcgtatatggcagactgaaatgatccttttttctttctttaccgagaaaggagtgcgttcggtactgacctttctggtacataaaaatttttgtgagaatgcctccggatgcatacagaatatgatctgagacacaggagacggtttatggcctcggaatttctaaaagctgagaaggcatggaagggtactttttagatactgcgcctgtttttccggattgttcaggaaagcttcgctgcagggaaaccaggtataacaggtttccggagtggcgggaatcctcagacttttgtccatgtactgacttaactgtctgggcatggcggtatcttctccgggaatataatcataggctttgtaatctctgtagtactggcgtattttctgatctgtggaagtgaccagaagagctccttcctgatcccggacagtaatataaaaatctgttccctttttggagacgggttttggcacaggagccggaagccggaaagaaaggatcatccggtcttcatctgtttccgctttcagaggctgataatcgccttccatcagaacccggtatccgagcatggaaaaaatgctgccaagtcccaggagatcctcctgattgtgaccgaggatggtctgttcaggctcggcctttggattttttatgtaggatttataaagacgaatgcactgtccgccatcgcagtggaggcgggagtccagccccaggaatttttccagatccggctgtttcattcgttccagcttcaggagatctttacagggcttcagttcctgatacagatccaggacagggagatttccgaagggagagggcagattgtgttttttgtaacgcgcttccagatacggctgatcgaatcgtctgccattatattggattgtggagcttgcagaagtcagaaaattaaaaaattcacaaagaatttcaggttcctcatcctctttttccgccatccactgatggagaaaccatttgttattttcctgcattaccgcgccaatcaaatataaaaaagtggaatatcgtgatagtccggtggtttcgatatcataaaaaacaggggcgtttccacagtcgaaagagacggaattcgacaattttttaacagtctcgaagtccggaaacccttgtaaaataggcatttttttaacaatcatattttttcattcctttcgtgattgtacttaattatacacaaaaaaataaaaaaataatagtgaattttttcataaattgagttatagtataaacatcgttactgttcagataggcatgcttcctccgggcattttggcatatatatgcaaagctcccgggacattcagggcaaaatgccatcaccgaaggtcagatggattgtaacggaacatcagcagatgtttgtctgaaacaggaatttaaggcagaaagacgggatagttatgtggagtttgacaattaacgggacagatctttatcatattttaaactggttttttatttacagcttttttggctgggtatgggaaaccttttatgtttctacaaagcatggagagtttgtgaaccgaggctttgtcagcgggcctttttgtacaatctatggctttggggcaatatctgtttatctgattctgaagccgatagaaaatcatgtgctgcttttgttcttagggggcattgtggttgccacagtgctggaatatattacggcggttctgatggagagtatttttcatacctcctggtgggattacagcgaccagaagtttaattttcagggacgtatctgcctgggagtttcgctgggatggggagttctgacagttcttctgttcagggttctgcatccgcttgtagagaaactggttgccatttatcctgtgtatgtgggaaaaattgcagtgtgcgtaatagcagcggggtatctgtgtgatttctgccgttccgcatctgcagccttccatttgaaggagagaattccttactgggagcaggatctggaaaagaagcgggtggagcttatgctgaggctaaatgtgaagctggaatcgctggagcttcccaaaggtgcttctcctgaacttctcagagaaaagctggaagattcagaagctctcaggattttaagcgaaaagcgtcttgcattccagaaagaattcacagaagagctccgggcttacagaaaaacgctggtaaacagaacaaagggaaataccagacgtttcctgaaggcttatcctcatctgaatcgtggataccgtatgcgccataagaaagataaaaaataacttgcaaaaggaggaaatagatatgggaaaacttacctttaagggtgggattcatccctatgagggcaaggaactgtccaaaaacagtccgattgaaaagtatcttccaaaaggagagatggtttatccgctgtctcagcatattggagctccgtctgttccctgtgtgaacaaaggtgaccgggtcctggcaggacagaagattgcagaagccaacggatttgtatccgtacctctgcacgcttctgtttcaggaaccgtaaagggctttgaaaaaagactgactgctgcgggaagtatggcggattccattatcatagaaaacgaccagcagtatgaagagacaggattccaggcagcagagctttctgaattgtcaaaagaggagatcatagcaaggatccgtgaaggtggcgttgtgggaatgggaggagccggtttccctactcatgtcaagctgtctccgaaggagccggataagattgaatatgttttggtaaacggggcggagtgcgagccttatctgaccagtgattaccggagaatgctggaagaaccggacaagatcgttgcgggtcttgaggtaatgctgaagctttttgatcatgcaaaaggctatatctgcattgaagataataagccggactgtattgcaaagctccgtgaactggtaaagggacattccagaattgaagtgaaagaggttatgacaaaatatcctcagggcggcgagcgtactctgatctatgccaccaccggaagagagatcaattcctccatgcttccggcagatgcaggctgcgtggtggataatgtagatacagttgtggctgtttataaagcggttattctgggacgtccggttatgaacaggattgtgacagtgacaggagatgccattgccagtccaaaaaactttacggttcttacaggaacaaatatggaggagctgatcgaagccgcaggcggactgaaaacaggcgctgcaaaagtaatctcaggcggtcctatgatgggatttgccatgtttgaccttcatgttccctgtgtaaaaacaacatctgcgttcctctgtctggaaaaggatgctgtttcagaggcacagaaacagatgacagcctgcattaactgcggacgctgtgtgcgcgtctgtccgggacgtgttctccctgcccgtcttgccacactggcagaaagaggggatatggcaggatttgaaaaattaaacggaatggaatgctgtgaatgcggctgctgcagctatgtatgccctgcaaagagaccgctgactcagagcatcaaatccatgcggaaaatggttcttgccagccgcagaaagaaataggggaggtaaaccaatggaacaaaagtataatgtgtcatccaatcctcacgtaagagatggtatgacaacaagcagaatcatgcagctggtagtgatcgcgcttcttcctgcaacactgttcggaatctggaattttggttttcgtgcattccttgttgttgcggtaacagtggcatccagcgttatttttgaatggctctatgatcattctatgcacaaaccaaatacagtaaaggatttcagcgcagttgttacaggacttcttcttgctctgaacatgccggcgcagatcccgctgtggatgccggttctgggaagcgcattttctattattgtagtaaaacagctttttggcggactgggacagaactttatgaacccggctcttgcaggaaggtgtttcctgatgatttcctttgcaggaagaatgacagactttgcagtgtcagatcatttccggggagttgtggatactgtcacaggagccactcctttggcagctctgaaaacccagggatttgtagaaggtacctctgtaccggtacagaatttgttttttggaaatatccagggaaccatcggagagacttccgctcttgcaatccttatcggcgcagtgatccttcttgtatttaaggtgatcgacctgaagatcccgcttacatatatcggcagtttttctgtgtttgtgatcatctatatgctgtgcacaggaatgggatttgatgtaaattatctgttaagtcatctgttcggcggcggtctgatgcttggagcatggtttatggcaaccgattatgtgacaacgcccattacctttaagggacagcttgtatacggctgctgccttggcgtggtaactgcagtgttccgtctgttcggcggttctgcagaaggtgtttcctatgcgatcattttctgcaaccttctggttccacttattgaaaaagcaacctatcctgctgcatttggaaaaggagggaaaaaatcatgagtattgtaaaagacacgatttccattactgccatcaccctcgttgcaggtctggctctgggagtggttcaggatattactgcggatcctattgcagagcagaagatgaaggcaaaacaggaagcctataaatctgtttttccggatgcagacagatttggggaagttgaactgggagataagacacaggagctggccggcgtactcagtgacagcggctacggcgcgcagaccattgatgaagtaatgacagcctttgacgcttctgacaatgagatcggatatgcgtttactgtgacaacctccgagggctatggcggagacattcagttcgccatgggcgtacagaaagacggtacactaaatggaatctctattttgtcgatcagtgaaactgcaggtcttggaatgaaggcggacacagatgattttaaaaatcagttccgggataaaaaggtggaaaaattccaatacaccaaaacaggagcagcatcagaggatgaaattgatgccatcagcggcgcgacaatcaccaccaatgctgtaaccaacggagtaaacgcaggccttgccgcatttcagtacatggaaggaggagaacaatgaaagcaaatacaccatcagaacgtctgattaacggtattattaaagaaaatcctacttttgtgctgatgcttggtatgtgccctacactggcagttaccacttcagcagtgaacggcatcggaatgggactgaccaccacagccgttcttgcagcatccaatctactgatttccctgctgcgcaaatttattccggacggtgtgcgtatgcccgcatttattgttgttgtggcatcttttgtaactattgtacagatgcttctggaaggcttccttccgggtctttatgcatctctgggattatatattcctctgattgttgtaaactgtatcattcttggccgtgcggaagcatatgcatcaaaaaatcctccgatcccatcactttttgacggtatcggaatggggcttggatttacgttaagtattacctgtatcggcgcagtcagagagctgatcggcgcaggacagcttttcggtcagcagattctgccgctggcagatgctgcagccggagaaatgggatatgaaccggttacgatctttattctggctccgggagcattttttgttctggctcttctggcagctcttcagaacaaattcaagatcggcgcggcaaagcgcgggattgatccgagtaatccggacaagtgcggcggagcctgtgcttcctgcggaaataccatgtgcaaaggaggtaaacattaatgaaagaattaatgcttatcattgtaggttctgcacttgtaaataacgtggtcctcagccagttcctgggactgtgtccgttcctgggcgtttccaaaaaaacagaaaccgcagcaggcatgggaggagccgtaatctttgttattacgctttcttcctttgttacaagtgtgatctatcagtttattctggttcccactcatatggagtacctgcagaccattgtgttcattctgattattgcggcccttgttcagtttgtggaaatgttcctgaaaaaggcaatgccttctctttatcaggctctgggagtttatcttcctctgatcactacaaactgcgctgttctgggtgtggcccttatcaatgtacagaaggactacaatatccttcagggcactgtaaacggttttgccacagcagtgggctttactctgtccattatcgtaatggcaggtatccgtgaaaaaatcgagtacaatgacattccggaatccttccgcggctttcccattgttcttattacagcaggactgatggcgatcgcgtttttcggattttcaggactgatctaaggaggcgtaaatatgaatatcggagcaattatcgtagcaactgttgtagttgcggcagtgggcctctttatcggcatttttcttggagttgccggaaagaaatttgcagtggaaacagatgaaaaagaggtggctgtccgtgaggcccttccgggaaataactgcggcggatgcggcttccccggctgcgacggcctggctgctgcgatcgccaaaggagaggcgccggttaacggctgtccggtaggcggagatgcagtaggaaaagtgatcgcagggatcatgggacaggaggttgtggaaacggtccgtcagactgcgtttgtaaaatgtaccggaacctgtgaaaaaacaaaaagcgattttgtatacaccggtgttgaggactgtgagatgatggcctttatcccgggcggcggggcaaaaagctgttcctatggctgtatgggcttcggaagctgcgtaaaggcctgtccctttgatgccatccacattatcaacggtgtggctgtggcagataaggagaagtgcaaggcctgcggcaaatgtgttgccaaatgtccgaatcatctgatcgagctggttccctatatccagaccacctttgtgggctgcagttctcatgataaaggaaaagctgttacttctgcctgtgaggtgggatgtatcggctgcaaaaaatgtgagaaaacctgtccgaacggcgctattaccgtaacagatttctgtgctcatattgattatgaaaaatgcaccaactgcggcgcatgtaaggaagtctgccccagaggcgtgatcctgtaaaaaatataagactgttgtacatacagtaagatcccggtttacagataaaactctgtaccgggattttgtattaccgggagagcagcgcattctgtatgaacctttacggccgccggaggatgagggagatttctcgaatagatgtttgcttttttgcgataactgtgatatcataaatcgatacaggaaaaatcaagcacaggagcggcagcttatgatttcatttatatatggcacagtagtggattccacagaaacctcagtgatcgtagaggcaggcgggatcggctatgagatttttatgacaggctctgccattgaacaggcagtccgaaaagaaggacaggtaaagatacatacgcatttccatgtgagagaggatgccatgcagctttttggctttttaagcaaggatgatcttcagatgttccggcttcttctgggcgtcaacggaatcggcccaaaggcggcgcttggggttctcgcagggcttacggcagatgaactgagatttgctgttttatcggatgatgcaaaaaccatttccagagctccgggtattggaaagaagacggctcagaagctgatcctggaactgaaagacaagctgaagctggaggatgcttttgagaagaagcttgcccatgagcaggatgcggcagccatttcagggacaaatatcctgaatggaagcaaagaggcggtggaagcactggttgcgctgggctacagcagtacggatgccctgcgggcagtacgtaaagtaacagatgtgccgccggatgatgtggaagccattctgaaagcagccctcaaaaatctgtaggagtttatatggaaaaaagaatgatcaccactgatgtaacagaagaggactttcctctggagggaaatttaaggcctcagacactggaagagtacattggtcaggaaaaaacaaaaaaaacactgaaaatttatatagaagcagccaaacagcgaaaggatgcgctggatcacgtgcttttttacggccctcccggactgggaaaaacaactttgtccggaatcattgcaaatgagatgggagtgcatatgaaggtcacttcagggcctgccatagaaaagccgggcgaaatggcggcgatccttaacaatcttcaggagggagatattctttttgtggatgagatccacagactgaaccggcaggtagaggaggtcctttatcctgccatggaggattttgccattgacattatgatcggaaagggggcgtctgcccgctctatccgtctggatctgcccaagttcacactggtgggagcgaccacaagagcaggtcttttatctgcgcctctccgtgaccgtttcggcgtgatgcatcatctggaattttataatcataaagaactggaaacgattattctccgttccgcgcaggtgctggacgtggagatcgaccagaagggggcggcggagatcgctaaaaggtcaaggggaacgccaagacttgccaaccggcttttaaagcgtgtccgggattttgctcaggtaaaatatgacgggaagatcacctatgaggtggctgtttttgccctggatcttctggaagtggatcagtacgggcttgacaagatcgacagacggatccttaaaactctgatcgtaaacttcaaaggaggcccggtgggtctggaaacactggctgcagctattggagaagattccggtacattggaggatgtctatgagccatatcttcttcagaacggctttttaaaccgcacgccaagagggcgtatggcctcgcctcttgcctacagtcatctgggctatgagaagatttcataaaaaattctatacttttcgacaagtttcgggtataataaaatatgaatgattttttctgtctccgggaaaccgtgattctgaaggaaaatgagacaggaactttaatggaaaatcagggaaattttatatacacaggaggctttgtatggcagtcaagaatacggcacaggtagtgatcgggggaaagatcatcactctgggaggctatgaatcagaggagtattttcagaaggtagcgtcttacataaataataaaattgcggagctcagtgaaatgccgggttattccaggcagccaatggagacaaagcatactctgctcagcctgaatattacagacgactattttaaggcaaaaaagcaggcggaaatttttgaacaggatcttcagcagaaggatcaggaaatgtatgagttaaagcatgaactgatcgctctccgtatgaaaatggaggaaacggaaaaacaccagcaggagtcagagcaccagcgcatcctgatggaagggaagatcaaagagctggaaggcgaaattgagtcattactaaagtaaaagtcagagggggattgcttcggtagtcccctttgtctgttttcagggattctgaaaacagtttctgtacagcagaaaagagaagtgagggattatgacagatatgaataaaacagagcttctggcgcctgcaggttcctatgaagcctttgaggcagccctgggagcaggggcagacgcggtgtatgtaggcggtcccgatttcggcgccagggcttatgcgaagaattttacccaggaggagctgatacgcgctgtgcgtacagcccatcttcatgggaaaaaattatatcttacagtaaacacattgctgaaaaacagagagctgaaggagcggctttatgattcccttcttccatcttatctggagggactggatgcggtgatcgttcaggatatgggagttctgcgctttatcaggagaaactttccggatctgtccattcatgcaagtacgcagatggctgttaccggaccgaagggaatgcggtttctggaacagcagggagtaacccgtgtggttcctgcccgtgaactgacgcttgaggagcttgcttccatgcacagggaaagccctattgagattgaggcgtttatacacggggcgctctgctacagcatatccggtcagtgccttatgagcagtatgatcggaggaagaagcggaaaccggggaagatgtgctcagccctgccgccttgcttatcaggtaagggagcagcagggaggatttaaagggaaagaaacctgtcctctgagcctgaaagatatctgtacccttgatattcttccggaaatcctaggtgcaggagtgatgtcccttaaaatcgaaggaagaatgaagcagccggaatatacggctgcagttacgggaatttaccggaagtatctggatatactaaagaaaaatccggattcctatcaggtggatgctcaggatcggaaatatcttctggaggtatttaacagaggcggttcctgctccggatattataaacagcagaacggcccttccatggtggctttttccaatcataaaaaaacaggagatatctctgtgcctctgaagcagaaaaaggaaaaaataaacggaacactgatgctgtatccggaaagccctgcagtgcttcaggtttctctgaaggatacagagactgttgtatcagcgggggaggttcagtatgccagagagcatcccatggaagaagcgcggatccgccagcaaatggaaaaactgggaaacacagaatttgtctgggacagtcttgatattcagtccgacggaaatatttttgtgcctgtaaaggttttaaatgaactgagaagaactgctcttgcacagctggagcaggagtttcttgaaaaatacaaaagagaagctccggaaaagattctccggggggaagaagcgaagatacagcccggagtcagatcagaggatccactgggtatctatgcctcctgcgagaaaccggaacaggcagaggtccttatgaacagtccggagatcacaggcctttatctgccttttgatgtgatggaaacctgtatggaacagggacttcagaaggaaaaagaactgtacctttctcttccgcggatcacccgtgggaaaatgccggaagagtatcgaaaaaaggctctgacctggctttctatgggaatgaaaggctttctggtaagaaatctggaagcctatggaatgctgagagaagaggggcttcagaaatattgtgtggcagatgcgtctctttatacctggaatgatgaagcctgcgcgttctggaaagacgaggggattctgagaaatactgttcctctggaattaaatgaaaaggagctgcgccacagaacaaaccgggacagtgagtttattatttatggttatattcctctgatgctgtctgcccagtgtgtgcgcaagaacacttttcagtgtgacagaaaagaagcgcatatggtgttaaaggacagatatgataaggaatttccatgcgcctgcgtctgctatccctggaaaaccggaactacagaccaaaaagagttctgttataatattatttataacagcatcccttatggacttttaaatgaaagccaaaaggtaaaggaacttaaaacagcatctctcagactttcctttactctggaatctgcaaaggagacaaaggaaatcgtcagagagtttctggacgtatatgtttacggaaaaaaagcttctgcccgtgagtttacaaagggacattttaaaagaggagccgaataaggcatatgattaatgtaattgttgaattatcaaagtatctgatcctgacgctgatgatcatttatacctttcactgtttttacacagtgcgccagcaggatgagattgagagaaacgaacttctgcgccagcagatggtgctgatcttttttatggatttcactgcatttctggtgatctatctgaaaacctttaattttcaggtgattgttttttatgttgaaatgatggtgttttttgcagcggtgcagatcctgtacaggattttttacaaaaaggcatccctgcttcttctgaacaatatgtgtatgcttttaagcgtgggatttatcatgctttgcagactggacatcgccacagccacgaaacagcttgtgatcgcggcggcagccagcggaatcgcgctgatcattccggttatgatccggaaaatgaaatttctccgaaggcttacctggctttacgcaggagtgggcatcatcctgcttgcggcagtttttcttcttgcaagaacaagctacggagcaaaactgtctctgatgggaattcagccctctgaggttattaaaattacctttgtgttttttacagcctctctgttttccagagcaaacgattttcgcacggttgtgcaggcaactgtagtggcggctcttcatgtgggcatcctggtgctttccagagatcttggaagcgcggtgatcttttttgccgcctatcttgtaatgctctatgtttccacaaaaaagcctcagtatctgggacttggactggcggggggaagccttggggcggtggtggcatacttccttttcggtcatgtgcgccagagagtcagcgcatggagagatccgatggctgtttatcagaacgagggctatcagatcgtccagtcactgtttgccatcggaacaggcggttggttcggcatgggactttgccagggttcgccggagtctattccggttgtaaaaaatgactttattttcagcgctatctgtgaggaactgggcgggatttttgcaatctgtctgattctggtatgtatgagctttttcctgatgatcgtaaatattgctctcaggatcaaaaatccgttttacaaactgattgctctgggactgggaacagaatatgcatttcaggtcatcctcactattggcggagctaccaagtttattcctatgacaggcgttaccctgccgctggtaagttacggaggaagctctgtaatgagtacgatcctgatgcttgccattatccagggactgtatattttaagagaagacgaggacgaggaatttgagagacgcagaaaagaagcagcgcagagaattcgagcaagagaggaagcgcgcagagcgagagatatctaaaaaaagacgtgccagaaacagagaatatacatttgtatcctggttttttgtggctgtttttatggcaatgatcggatatcttgtatattttaatgtggtaaaaagcgaagactttatcaacagtccgtacaacaccagacaggacaccttttcggaccgggtggtaagaggacagattctttcttctgagggagaaattcttgccaggacggatgtttatgatgacggtactgaggacaggatctatccctatgcaaatgtgtttgcccatgtgatcggatatgattccaacggaaaaagcggactggagtcagaggcaaactttcagcttctgacctctcatgagtttttcctgaaccagatgaaaaatgaatttctgggaagaaaaaatatgggagataccgtgatctccactttgagcgcaaacctgcagacaaccgcctataatgctctgggggacagaagaggggctgtggttgccatggagccttctacaggaaagatacttgccatggtcagcaaaccggattttgatcccaactccattgaagaaaactgggaatggctggtcagtgatgagacaaactccagtcttttaaacagagccacccagggacagtatccgccgggatctaccttcaaagtggtgacagctcttgactatttcagaaaacatggaagctttaacggatattcctatgtctgtgagggaagtattacaaaagaagatcataccattcagtgctataacgggacagtccacggacaggaggatttttactcggcctttgccagctcctgcaactgtgcatttgcgcagatggggctggatctgggaggaggatctctgctggaaacaagcgaggatctgctttttaataaaaagcttccccttgcctcctacaaaaaaagtaccttcagcctgaacggaaagtcaggaatccctcttaccatgcagacctccatcggtcagggaaacacccttgtttcccctgcccatatggcaatgatcacctgcgctattgcaaacaacggagtgcttatgaagccgtatctgattgacagagtagtaaacaatacaggagatcaggtagatgaaactgctccggaggtgtataaacgtctcatgacaaaaaatgaggcagtgatgctgggagagctgatgaaagatgttgtagaatacggaaccgcctctgctctttccggacagggctatacggcggcaggaaagaccggttccgccgaatatgatgaaaacggctccagtcattcctggtttatcggatattccaatgtggatgatccggatcttgcggttgcagtgatcgttgaaggaggaggtaccggaagcgaggctgctgtgccgatcgcctctcagctttttaacgcttattactacaactgaccggaacaaacagttgccagcagaggcaaaaagagttatactatatccagtttgaaatatcattcacacgcattacaggagggacttgcagatgatagaagcaacgagctgtggcggtgtggtaatttatcgtggaaaaatactggctttatacaaatcttacagaaacagatatgaaggctgggtattgccaaagggaaccgttgaaaagggagagacccatatccagacggcgcttagggaggtcaaggaggaagcagatgtaaacgcttctattgtaaaatatgtaggcaaaagtcattacaattttacagttcccgaggatatggtcaccaaggaagttcactggtatctgatgacggctgataattatcatagcagacctcagagagaggaattttttgtggactccgggtattacaagtttcatgaaatttatcatcttctccgtttttccaatgaaaaacagattgtggagaaggcgtatcaggaatatctggaaatgaggagtcagggactctggggcaaaaaataaacagggttgtgttttacgcagccctgtttagatttatcaaaaagggggaatcctttaaatgctgaaatggcatgaccattattacgtaggagaaagtgtacgtgatgaaagcgcagtccgtgagaagctggatgcaggaaaacctgtgcccggaatttatctggtgactttttcggacaaccctcataacattctggagatcattccggctgtgaccctgttccagaaaactgctgccagactgtgtcctgagatcgtaggcatggcaaagggcatggatgaagccatggaactggtgcagatgatcgtacagactgtgtatgaggagacaggggatgtcctggtggaaaaatatttaaaaaacaggtgaaggcatgttacatatcttatggatgctgataaaattgatattgatccttctgggaacggttttgggactggcagtgcttgttttgctgctgcttttgttctgtcctgtcagatacagcgccgaggctttaaaagaaacgtcctcttttaaggaaaccgaagccgcagttcgtgtaagctggctgttcggaggcatttcctttactttcagaagaatacagggaaaaaatactcagaaactttgcgtttttgggattccggttctgagccttctccaaaaacggaaacagaaaaaggccgctgccgggaaagtgcaaacggcagagaaaagccctttgtctgaacagccgactgagaagccgctgcccgagacaaaaatatccctgcctgagacagaaatatccctgccgcaggaaaagaaaccggatattccctatggttctgccgaagcaaaacagaaaaaagatccggaaacaggcacttctgatctcagtgaatcagacgagaagatccggactgaaaacaagaataaaatatcagcacttccggacaaactaaaagaaatcatggacaggcttgcgcagcttccttccatgctcagcaaaattccgttaacaatccggaggatttatgataagatagactggtacagacagttttttgagcatcctaggacaaaggaggcagtgagtctagttcttgaccggagcaaaaaactgatgcatcatattttcccaaaaaagataaaggggaaggtgacttttggaagcgaagatccttccataaccggaaccgctcttgcagttctgggaatgacaatgcccttccataaaaacagagtggagattgttcctgtttttgacaatcagaatattctggagggaaatataaaaataaaaggcaggatctacggctttgtaccggtgaaaatgctggcagagctttatttcaataaaaatattaaatatatcatcagccgatggaagcataaggaggtctgaaaatggcaaacgaaaataattttaaggacacggtaaattccctttttaaaggactggacacatttatttcagcaaaaaccgttgtgggggaggcagtccatgtaggcgataccatcatccttccgttggtagacgttaccttcggcgtaggcgcgggagcctttgagggggacaaaaaaagcaacggcggcggtggaatgaccggaaagatgacgccgagcgctgtgctggtgatccagaacggaactacgaagctggtaaatattaaaaatcaggacggactgaccaaggttcttgatatggttccggattttgtggacagatttgccgcaggaaaaaacagcagtgaaacaaccggcacagaaatctgattttatctttttatttgtgttcccggaagtatttgccgcataagatagtatagaccaaagagaagaggttgtgcgatgtgggaagacttctgggactgatgcttttttgtatagggattggaatggtgatcggaatgctgatcgcggaaagtgtgattattgtgatcgcagcaggtctctgtctgctttgcggatatcatatgttttgcagataaaaaattccccacgcttttgcgaggggaatttttaagtttgagttttatgctctttcaacttttccggatctcagacaagaagtacatacatacatctttttagctccgcctgtagcagttttaacttttacagactttacgttggatttccacattttattggatcttctatgggaatgacttacattatttccgaagtgagcacctttttcacagattgcacatttagccatgatagcacctccttgacgctttttttcaacagattttattttaacagatgaaaaaggcttttgcaagcaaaaaaaggaaaaatataaaaataatattcctttttccgggaaaaaaggttataatacatacatattaaaaaaatggaggtacctatatgaatggacgtatagattccggactcggacagatagtgattgacaccgatgtgattgcaacctatgcaggcagtgtggcagtggaatgcttcggcattatcggcatggctgcagtcagcatgaaggatggtcttgtcaaactgctccacagggacagtctgaaacatggtatcagtgtgatcattacagaagaaaataaaatccgtctgaatttccacgtgattgtggcttacggtatcaatatcagcacgattgcggacaaccttgtcagcaatgtcaaatataaggtagaagcttttaccggcatggaaattgaaaagatcaacatctatgtggaaggcgtacgtgcaatagactaagtttatgaggaggaacttgtggtgagtataaaaaccatagatgcaaaaacactggccagaatgtttctggcaggtgccagaaatttggaagcaaaaaaagaatggatcaatgaactgaatgttttccctgtaccggatggagatacaggaacaaacatgaccatgacgatcatgtccgcagcttctgaggtaagctctcttgaagaatttgatatggaaactctggcaaaagctatttcttccggatcccttcgcggcgcaagaggaaactccggagttatcctttcccagcttttaagaggatttacaaaaagtgtaaaaaaagcagagcgtctggatgccctggcccttgccgcagccatggaacgggcagtggagacagcatacaaggctgttatgaagccaaaggaaggaaccattcttacagtggcaaaggaggctgctctgaaagcagcggagatcgctcctgaggcagacgagcttcagccgttttttgaggaggtctttgcccatgcggaggcaactcttgccagaacgccggaaatgcttcctgttctgaaagaggcgggggtagtggattccggcggacaggggcttctggaagttctcagaggcgccatggacggcttcctaggcaaagagatcgactattctgtttttgaaaagagcagttctccttctgtaacaaagatctctcctcaggcagaggcagatattaaattcggctattgtacagagtttatcattcttctggataaagctgtttcagaggaagaggaacataaatttaaagaattccttacttctattggcgattccattgttctggttgcagacgatgagatcattaaagtgcatgtgcataccaatcatccgggacaggctattgaacgtgctctgacctatggcgctctttccagaatgaagattgacaatatgagagaagagcatcaggaaagactgatcaaggatgcggaaaagcttgcaaaagcgcaggcagaggcagagccgccaaaggaaaacggctttattgcggtttctgcaggcagcggacttacagagatcttccgtgagctgggtgtggattaccttattgagggcggacagaccatgaacccaagtacagaggacatgctgaatgccattgcaaaggtaaatgcggaaaccatttatattttcccgaataataaaaatattatccttgctgcaaatcaggcccgcgatctgacaaaggataaaaagatcatcgttgttcccaccaagacagttcctcagggaatcactgccatgatcagttttgttccggaaaaatcagcagaggaaaacgctcaggaaatggaagaggcagtttccaaggttcagacaggtcagatcacttatgcggtccgcgatacacgtctggatgacaaagagatccatgagggagacatcatgggaatcggagataagggaattcttgctgtaggtaaggataaggagcaggttgctcaggataccattgaagccatgatgacagaggatgcggaagtgatcagtatttattacggagaagacgcatcagaggaaaaggcagaagaacttgctgctgctgttgaagagctttatcctgactgtgaagtagagcttaacagaggcggacagccgatttattattacattatttctgtagaataaaatgggagaaagtttaagaactctgaaaggagtgggagaaaaaacggagaagctgtttcagaaaataggtatttctgacacggaatcccttctccggtattatcccaggaattatgatgagtatgaaatgccggcagatattgcagatcttaaagaggggacggtgaaagccgtctccgctgcagtatgttccggcgtttatgtaaatccggtacgaggaaaacaggtcgtttctattaccgcatgcgacagtacaggaaggatctccattacctggtttaatgcttcctatctgaaaaatactctgaaaaagggaagtgtttttgtattcagaggaagagtgatcagacggcagggcaagcttcagatggaacatcctgaaatttttacccctgcagcctacgaggagatccttcacagccttcagccggtctacgggcttacggcaggtctttccaataaaaccattgtaaagctgcttcaccagcttctgaaacagcagtcactgaaaagcgaatatcttccggaagagatcagggaaaaatatcagctttcagatatcaactatgcgctccgcaccatccattttccccaaaatatggatgagcttcttgtatcaagaaagcgcctggtatttgatgaatttctgttttttattctttctgtccagcttctgaaagaaaaaacagaagaggcggtgaatctgtttcccataaaaaaaacatggacaacagagcaggtgatcgaaaatcttccctacaggcttaccagcgcccagctgaatacctggcatgagatcgagcgggatctttccgggcagtctctgatgtccaggctggtgcagggagatgtgggaagcggaaagacgatccttgcctttcttgccatgatcctgacctttgaaaacggataccagtctgcgcttatggtgcccacagaggttcttgcccgccagcactttgaggcgtttcagacacttgtccgggaacaggggctggatattccggttgttcttcttaccggttctaatacggcaaaggaaaaaagactgatttatgaaaatatcagggagggaaagacctctgtgatcataggaacccatgcgctgatccaggaggctgtgcagtatcgggatcttgcccttgtgatcacagatgagcagcaccgttttggtgtaaaacaaagagaggctctggcaaccagggggaatcctccgaacattcttgttatgagcgcaacccctattccgagaactcttgccattattctgtacggcgatctggatatttctgtgatcgacgaactgccggcaagaaggcttcctataaaaaactgtgttgtagatacttcctaccgcccaaaagcctatcgtttcattgaacgtcagatacgggagggccgccaggcatatgtgatctgtcctatggtagaagaaagcgagggtatggaagcggaaaatgtcctggattatacaaaaaaattaaaagatgctctgccggaggatatttctgtggagtttcttcatggaaaaatgaaaccaaaggaaaaaaacaggatcatggaagaatttgcagccggaagcatccaggttcttgtttccacaactgttgtggaggtaggcgtcaacgttccgaatgcaactgtgatgatgatagaaaatgccgagcgcttcggtcttgcccagcttcatcagctccggggacgggtgggacgcggagaatatcagtcttactgtatttttattcagggcagtcaggaaagcaccacatccaaacgtctggagatccttgggaaatcaaatgatggtttttatattgcggcagaagatctgaagcttcggggaccgggagacctgttcggcatccgtcagagcggactgatggaatttcgtatcggagatatttacaatgatgcaaatattctgaaaaatgccagcgaggctgccgcgcagattcttgctctggatccggatctttctctggaacagaaccttcctcttaaggaacagcttgatttctgcagggaagacggaccggataattttggactttaggagatacaatcctgcaatatcaggactttagtgaaataaattgttgcaaaaaaacaaaaaacgtagtattctagtaccgtaataattttatttcaccttgtaaggaggctattatggctacaagaacaacaacaaagaaagcagaacctaagacaacaactgcaaaaacggctatcgaaaaagaggctcctgcaaagactgctgcagaaccggcaaaagcggacgcagctacagctaaaaaaaacactgagaaaacaactgccagaaaaacagcagcaaagaaaaccgcagaaaaatctgtctctgcaaagaaaccggcggtaaaaagaactgcagcaaagaagacagcatcagtaaatgcagaagtatatgtacagttctggggcaaagaggtgtatgcaaaggatatcgtggaaagcgttaagaagatatggactgacgagatgggcaaaaaagaatcagagctgaaagacctgaaagtatacattaagccggaagataacggagcacattatgtcattaacggtgacatcacaggcttccttggtttataagaaacagaaaaaagctcaggggacagttgtcacctgagcttttcttctgaccgtattcttagaactggctgttctgaacaccgccggacatctgacgttcctgttcagcaatcattttacggaccatttcaccgcctacagatccgttctgtttagatgtcaggtttccgttgtaaccgtcagtaagcggcacgccaagctcattggcaacctcaaatttgaaacggttaagagcaccctttgcttccggtacagttactttgttagaagaacttgtgtttgacatgattcatttcctccttggttgtttttgttatttggatgttacactggtagtatgtgaaatttacggaataatacactagaatatactgtctctgcttccagaaatttgaaattattaattttctgtgaattttgtatattctataagatttaattgcgttttttttggacatttgttataatatcaagggaaataaagaatgtataaagaagaaaaataaagaaactataaaatgtattggtgagaatggagagatgatcaatgaatttaggaatcattgcacacaacagtaaaaaagtacttattgaagatttttgtatcgcttataagaatattctcgctaagcatgaagtttatgccacgggaaccactggaagaaggatcgaggaggctacaaacctgcatgtgcataaatttcttgcaggcagcataggcggtgacaaacagtttatggaaatgatcgagcgccaggatcttgacatggtgatcctgttttataatccggcaatgcttgatcccaaggaaccggatattgcatccattaccatgcgctgcgatcagtataatataccggtggctaccaatatagctaccgcagaacttctgatcctcggacttgcacgcggggatctggattggagactgaatcttaaatgagagtaattgcaggaaaagcccgccgtcttcctctgaagacactgccgggttcagatacacggcccaccacggaccgtataaaagaaactttatttaatatacttcagccggaaataccggactgttcttttctggatcttttcagcggaagcggcgccattggtattgaggctttaagcagaggcgccgcatctgctgtatttgtagaaaaaaatccgaaagcctgctcctgtatcagagaaaatctgacatttacaaaacttgcggaaaatggtaaactgttagccatggatgcattacaggcactgcgttccctggagggacgccaggtgtttgactgcatttttatggatccgccctatgaaaaaggcctggaacgtcaggttctggaatatctggcggaaagtacactggcagatgaacatacgctgatcatagcagaggcagatcttcacacggatttttcctatgtggaagaaatcggttatgagatcagccgctccaaggaatataaaaccaacaagcatgtttttctgtacaaaagaaagtgagaatacacatggtaacagcagtttatccgggaagctttgacccggccacctacggtcatctggatgtgatccgcagggccagcgtttcttttgacagagtggtagtgggagttttgcataattctgcaaaaagtccgttgttttctgtggaagaacgtgttaatatattagaaaaggcgacaaaggacatcccaaatgttattataaagccatttaacgggctttctgttaattttgcaaaagagaatgaagcccaggttatagtgcgcggacttcgtgcggttacagattttgaatatgagctgcagatggcacagacaaaccgcgttctggcaccggatgtagatacggtattcctgaccacaagtctggaatatgcctatgtcagctctacgatcatgaaggaagttgcccgctttggcggtgatttagcgaaattcgcaccgcctgagattattcaggctctgcattccaagatgcaggaacaaaatgaagagaaataaggagaatgtacaatgagcagcagaattgaacagattattgacgacattgaggaatttatagacagctgtaaataccagcctctgtctaatacaaagattattgtaaacagagatgagatcgatgagcttataaaagagcttcgcctgaaaacaccggatgagatcagacgttaccagaagatcatcagcaataaggatgcgattctggaggatgcacagtccaaagcagacgcgatcattgcagatgcacaggctaaggctcaggagcttgttactcagcatgagatcatgcagaaggcttatgcacaggcaaatgatactattaatgcagccaataagcaggctcaggaaatccttgattctgccacacaggatgcaaacagcattcgtctcagcgcgatcacttatacagatgatatgatggcaagcatcggctctgttctgaatcagacacttgaggatgccggcggcaaatataagagctttattgaagcccttcagacctgtctggatgttgtaaatcagaaccgccaggagcttgctcctcagactgcgcaggcagcagcgatcaccggaacctatcacgacagtgaaccgattccggaggaggatgagctgttagacgaccttgaggaaaactaaggcacagatagcagtaattgctgcgttgaggcattttgcagaaatataaggcagaacagaaagatctctgtgaagaagactttttgtctgcgcgagaatacagactccgccaaaagcagccatgggcatggagcagagatatctgaaaacaggagacaggtctgatcttgcaagctgatgaagtccggttgtaagttccagggcacccagaaacagatattctgtcatttcccctgcactccagtaatgcctgataaaggcagacaggatcgaaaacaggagaatataaccacccagccgggtgattgtttcaaaaccattcataatggaggcatccagcagagttccggtaacaccgggcgcggatggctccttattttttttatcagaaaaattatccggagtttttgtatggtttctgtaaacaaaaaaacggaagataaccatagtgaggaagctggctaaaatcagcggcccatagataagccgggggtgaaacctgtcattgagacagatatgaatcagatatgtataaataaaaacaggactggcatgattggtaaaggtaagaagatattccgcttcccttcggctgatcctgccgcagccatacaggtctgaggtgatcttggttcccataggatagccgcacagaagtccaagaagcagggcgtaggctcctgagggggagatgccgaatacatggctccacacaggagccagaggcttcagaagtttttcggctgttcctgtatgaatgaggatcccggtaaggataataaaaggaagaagcgtgggaagcagggtgttcagccacagcttcaggccatctctggaagcggctaatgcctcttccggaaaacgcagcaagaatatcagcagcaggagagtacctgcagtataaaaaattcgcttcatatacaaccatcgttttttctttaatatatggtttgtatcaaataaatatgaagaattttcataatcacatgaaatggaggaacagaacatgagagcattggaaaactgtgaaccaaaacgggtattttattattttgaggagctttgcaagattcctcatggttccggaaatacaaagcagatcagtgattatctggtaagctttgcaaaagaacacggacttgaatatgttcaggacgagatgaataatgttgtgatttacaaaccggcaacagaaggctatgaggatgcgccggcagtgatccttcagggacatatggacatggtatgcgaaaaaagaccggatgtagatcatgattttacaaaggatcctttaaatatttctgtaaaggacggatatgtaacggcaaacggaacaaccttaggcggtgatgatgggatcgctgtggcttacggccttgcgcttctggaaagtaaagaccttgcacatcctgcgctggaggttctgatcaccgttgatgaggagatcggtcttcttggcgcggaaggctttgactgcagcgtcttaaagggaaaaagactgatcaatctggattctgaggcagaaggaagtctgtggatcagttgtgcaggcggcctttccggtatcagcaccattcctgtacagagagtggaggcagaaggtcagaaagcagcagtaaagatcacaggacttatgggcggacattccggagcggagattgacaaaaagcgtgccaatgccaatgttctgatgggaagattcctttacagccttcagcaagagactgcttatgagatcatttctctggcaggcggtcagaaggacaatgccattacaagagaagcagatgcagagcttcttgtggaggatataaattcagtaaaagcatgtgcggaaaagcttcagaaaggcttccgtgaagaatatgcaggaacagacgagggcatcacagttgaaattacagatcttggcgttgcctctgcaaaagttcttcatcctaccagcagagaaaaagttctgtttttcctgatggaagtaccttttggcatccagaaaatgagcggaagcattgacggtctggtggaaacctctacaaatatcggaatcgtgaagcttggagaggatgaattcctgggaagctccagtgtcagaagctctgttgaggcagcaggagcagctctttccgataagatctgctatctgacagaattcctcggaggagaatatactgttcagggagcttatccggcatgggaataccggaaagactctccgttgagagaccagatggttgaggtttatgaggaaatgtatggagaaaaaccaaatgttgtggcaatccatgcaggtcttgagtgcggtctgttctacaaaaaaatcgaaggactggactgcgtttcccttggaccgaacatgaaagatattcatacatctgaggaggttcttgatattgcctccacagagcgcgtatggaaatatcttgtaaaagtcctggaatctctcaaaaaatgaaaaaagtaagaattacagttctgcgtaaagaattttatccggagtacgcagatgagtatctgacagagggacagtctgtgggtccgtgccctttactcgaggttggggatgaatttatttttgagggcagcgcgaaaatgccggagggattttgtccgtgggcctggattgatatttacagaagtgtcagtgcaatgtcatccggttccagcaataaaccgtggacgaaaaaggatggacagacaattgtatgctgcacagatggagtacgcccggtagtgttttgtgtagaagctttcggggaaaatgatgaatctgtggagtaaaatataatacggtataaaaagcgccgctgtggaatgtatttctgcagcggcaattttcgtttttcttccgcatatattaaactgcaggtttgagctggaggatttatgaaaagaaaaaagatgtttctgataattaccggatttttttatcttctgtttcttacagatctggaagggatcatacgggatcggagctgcgcctcagttttatccggagatgttctgaaaagtgaaaaattccgggagcagaggatgtccggtgagctttataaaaagctgcataaatcttccggagaaagtggggactggatttctttactgactgcttccatggcggaagggggattttatcctgagaaggtttccgaaaatcaggagctttacagaaaatataaaccggaggaatttcagcttcttctgaatgcttaccgggcagtgtgggaggatgtgagatattttcccgttgcttcttcagaaattgtttttgaaaatacctggatggcaaaaagagaatatgggggaaaccggagccacgaagggacggatctgtttggaacggttcgtgagtccggatattatcctgttatcagtatgacagacggcacagtggaacaaaaaggatggcttcctctgggcggctaccggatcggcatccgttctcctcatgggggatatttttattatgcgcatctttccggatatgaagcaaatatcagaaaagggcagacggttgctgccggagacattctgggatatatgggaaataccggatacggatctgagggaaccagagggaaatttccggtacatcttcatctgggaatctatattgaagttccctttcaaaaagagctgagtgtaaatccatactggcttctgaaaatttttgagaaaaaaatcagaaactatacatattaaattacataatcttttaaaagtatgctataatatgcaggagtatcaaagtgtactccggtattttcctgcaaggagtgatttatatggaaatacagttatggagaagtattttatgcccttaccagcttgctgtcagagagctgacagtaaagttcgagcatatgatagaggagcataaaaaaaatgatctttattcgcctattgagcaggttagcgggcgtgtaaaaagtgttaccagtattctggaaaaaatgcagcgcaagcatatccccatggaacggatggaagaggaagtggaggacattgcgggaatccgtatcatctgtcagtttgaagaggatattgatacagtggcggctctgatccagaaacgcagtgacatgcagataaaaagtgaaaaaaactatctgaagcatattaaacagagcggttacagaagctatcatctgatcatttattatacggtggaaaccattgagggacccaaaaccattcaggcggaaatccagatccgtaccatggcaatgaatttctgggcaaccatcgagcattcgcttcagtacaaatataagggagaaatgcccatgcatgtggcagagcgcctcagcaaggctgcggatgccattatcgcgctggatcaggaaatgtcttctgtgcgaaacgagatcatggatgcacagaattcttccagaatgcagtccaatcttgtaaaagatattctttccagcattgagaatctttataagagttccaataaacgggaggtggaaaagatccaggatgaattcctgagggtgttccggaccaaggatcttcagcagcttgagcggttccacagacagcttgatattatcgcagagggctatcgcgcccagtcagtggcaaattaggagcagatacatgcatgaatttttaccagtaacagcacaggaaatgaaagaccggggatgggaacaggtggattttgtttatctgacaggagatgcctatgtagaccattcttcttttggcagtgccattatcagcaggctgctggaaagccacggctaccgggttggcatcattcctcagcctgactggcggaaaaaagaaagtatccaggtgttcggggaaccgcgcctgggttttcttgtgaccgctggaaatatggattccatggtgaatcattacaccgtgtcaaaaaaacaccgccagaaagactcgtattctcccggaggcgtcatgggactgcgtccggacatgcctacagtggtttacagcaatcttatccgtcagacctataagcatacccccattattcttggcgggatcgaggcaagcttaagacgtctggcccactatgattactgggaggaccgggtaaaaagaagtgtgcttcttgattccggcgcagatctgatctcttacggaatgggagaacattctatcattgaaattgcagatgccctgaacagcggtattccggtagaagagatcacctacataccaggtactgtttacaaaagtaaaacaacagataccgcctatgacccagtggcgcttccgtcttttgatcaggtcagagacagcaaagaagcctatgcggaaagtttttccgttcagtacagaaatacagatccttttacggcaaaaccgctgatcgaggattacggcacacggggctatgtgatccagaatcctcctgcgctgccgctcagtactcaggagatggatgatgtttatgatcttccctatatgggaacctggcatccgatgtacgacagtcagggggggattccggctctggatgaaatccggttcagccttaccagcaaccgcggatgcttcggaggctgcagcttctgcgcccttacctttcaccagggaaggatcctgcagacaagaagccatgaatctattttaaaagaagcagaaaaaatgacggaggatccggcatttaaaggatatatccacgatgtaggaggccctacggcagattttcgccagccttcctgtcagaaacagctgacaaagggcgtatgccagaatcggcagtgcctttttcccacgccctgcaaaaatcttacggcagatcacagcgactatgtgacgcttcttgggaagctccggaagattcctggggtaaaaaaagtatttatccgttccggagtgcggtttgattatgtaatggcagataaaaatcctgcgtttttacaggaactggtccgtcatcatatcagcggacagcttcgggtagcgccggagcatgtgtcagaccaggtgctccattatatgggaaagccttctcataaggtttatcaggattttctgaaagcctatgaaagggaaaacaaaaaaacagggcagaagcagtacgcagtgccgtattttatgtcctctcatcccggatgtaccatgaaggaggcggtaaagcttgcggaatatgtaagagatctgggatttacaccggaacaggtgcaggatttttatcctacgccttccacgctttccacctgcatgtattatacaggaatccatcctcttacaaaggaaaaggtttatgttccgaaaaatcctcatgaaaaagccgttcagagagctttgatgcagtataaaaatccggcaaaccggtcgcttgttctggaagggctgaaaatggcagatcggatggatcttgtaggtttcggaccaaaatgtctgatccgcccggagcgaaagaacaacgacgggggaaaggcaggcagaaaagggcaccctggagagaaaaactctgccggtaacagaaaaggaaaatcacgggaagtatcagggaaaaattttgccggaaaatctgtaaaaaaaacaatacgtaatacacataagaaaaaaaacagatagaatgaaggagaatcacatgagcaaaaaaaaagccgggaaacatgccaaaaagggtgaattcggttacgttgcagcagagaagaaacgaaaatttctgatcacagccattctgtttgcagtgccgcttctgatcttttttacggcaatgatttattttaaaacaagactgaccatctggacggtgatcgctgttgtgggctgtcttcctgcctgcaaaatgctggtgaatcttattatgctgtttcgctgtccgtccatggatccacagatctacagtcagattcaggaccattgtggaagcctggtcatgtcctatgaaatgtatatgactttttatgaaaaaagcgcgtttattgacgcctttgccatttgcggcaatctggtggtgggatacagcagcgatcctaagatagacactgcctttatggaaacggaagcccggaaaattctgaaaggcaacggataccgggcaaatgtaaaaatatttaaagacctcaagccgtttctggaccgtctggattccatgaacgagcataaagagtctctggaggaaggaatcaaattccggccggatgagcgttatccggagctttccagaaatgaactaatccgccatacgattctggcgatctgtctgtaggtgaaatatgaagcagtttacaatcaacggaaacgaggcggggcagcgttttgacaagtatctggcaaagcttttaagagaagcgccaaaaagctttgtatataaaatgctccgcaaaaaaaatattactctgaacggcaaaaaggcaacaggcaatgaaaagctgaaccagggggacgagatcaggctttttttaagcgatgaaacctatctgaagttcagcggaaaagaagctgcgcccagggcaagtacggatctggcggttatttatgaaaacagagatatccttctgatcaataaaccggcaggaatgctttcccagccggatgaaacaaaagagccttcccttgtggagtatgtgacaggctatcttctggacaccggcgctgtgacagaggaagaactgatcaccttccggccatctgtgtgcaatcgtctggacaaaaataccagcggacttgtggcggcaggaaaaagtctggcagggcttcaggctctctcagagctttttcatgacaggaccatccataaggattatctttgtatcgtaaaaggtgtgttaaaggaacagacgcatatccggggctatttaaaaaaagactcccgatgcaacaaggttactgtatataaaaataaagttcaggatgcccagcctgtagagactgtgtacacacctcttggcagcaatggaaggacaacacttctgaaggtacgactggttacaggaagaactcatcagatccgggcgcatctggcctcccggggatatccccttatgggagacagtaaatacggagacagggagtttaataaaaaatgccgggagcgttatggtctgagacaccagcttcttcatgcattcagcctgaccttccctcatctggagggagacctttgtgaggtttcggaaaaaaacttccgcgcagagctgccggagctttttgggcacattataaaagaagaacatttagaggagagttatcatgaaaatctggaatgaaatctgggattatgtaaaaatgatcataatcgtagtggttgtggtgctttttgtcaataattttattctcatcaatgcaaaaattccttctgagtccatggaaaataccattatgacaggggaccgtgtatttggattccgacttgcctatggactgaatgtggatctgtttggaaaccatatttccaaaaaagtaaaggatccggagcgttttgacattattatctttaaatatccggatgatgaaagccagctgtttatcaagcgtctgatcggccttccgggagagaccgtggagatcagagacggaaaggtctatattgacggagccctggagccgctggatgacagctttgttcctgaggtgcctaccggagactacggaccatataaggttcctgagaattcttactttatgcttggagacaaccgggaaaattcaagggattccagattctgggacaacacctttgtcacctttgatcagatcgtgggaaaagcagtgctccgttatttcccatccattaaaatcctgaaataaggagcggattatggcatgggtcagcagaggactccggggttctactctggaggagcttgtcaatcgtacaaatgaacaatatgcagaaaaaaaactggcactgatacagaagatccccactcctattacgcctgtgcgtatggacaaagatcatcaccagatcactctggcgtattttgaacagcgcagtaccgtagattatatcggtgctgtgcagggaattcctgtgtgttttgatgcaaaggaatgcagcacagatacgtttcctttaagcaacattcattcacatcaggtcgcctttatgaaagcgtttgaagagcagggaggagtggcattctttttgctctttttcagcagtgaggatatattttattatcttcctttacgccagcttttaattttctgggagcgcatggaaaagggaggcagaaaaagcttccgcagagaggaactggaacagcagttttaccttccgagacagagcggattttttgttccctatctggagggactgaaaatggatctgaatttacgggattgacaagtggtttcgcatttattataatcttgttatttaatatagtatcgcagtagcgaactaaagtaataataaggaggaaggaagcatgcagaggatttttcatacacctgagggcgtccgggatatatacggcagagaatgcaggcagaagcatgaactgaaacgccggatccgcagtgtatttcagaaatacggctatgaagagatagaaacacccacatttgaatattttgaagtattcagtcaggaggtagggacggttccgtccagagagctttataaattttttgacagagacggaaatacgcttgtactgagaccggactttacaccctcggtatcaagagcctgcgcttcttatttttctccggatcaggagccggttactctgttttatacaggacagacctttataaacagctccagctatcagggcaggctgaaagagatcacccagatgggtgtggagcggatcggggacgattctcccgaggctgacgcagagcttctggcaatgacagtggaagcgcttctgtcctgtggattaagagaatttcaggtcagtgtgggacaggtggactattttaaatctctgctgaaggaagcaggtcttgaaaaagaggcagaagaacatctgagagcgctgatctcagaaaaaaattacttcggcgtggaggaactggtagaagaacagaagctttgtccccaactggcagcagtatttcaggagcttcctcatctttttggttctgtggaagtactgaaaaaagccagaagccttacagataatcagtcagcagtccgggcagtggagcgtctggaacggatctatgagcttctgaaggtttacggatatgaaaaatatatttgctttgattttggaatggtaagccggatccagtattatacagggattatttttcaggcttatacctatggaacaggagaaccgctggtaaagggcggacgttataatgagcttctgaagcactttggcgcgcctgccgcttctgtgggctttgtgatcatggcagacagtcttcttactgcgctttccagacaaaagatagagatccttcccgatgaagaaccctatgttctcacctacacagaggaaactctggaggaaactctggtaaaggcgcagcgtctgagaaaagaagggcgttctgtgtctctgagaaaaaagaaggagggcttataatatgagatatcttaccattgccctgacaaaaggccgtcttgctcagaaaactctggatatttttgaaaaggtgggaattacctgtgaagagatccgggacaaaaattcccggaagctgatttttgtcaatgaggaactgaagcttaagttttttctggcaaagggtccggatgtacccacatatgtggaatatggagcggccgatatcggcattaccggaaaggatacgatcatggaggagggacgaaggctttatgaggttatggacctggggttcggggcctgccgtatgtgtgtgtgcgggccggaaagtgcaaaggagcttctccataccaaccagctgatccgggtggcaaccaaatatcccaatattgcaaaagactatttttataataaaaagcatcagacagttgagatcatcaagctgaacggctccattgagctggcgcctattgtagggctttctgaggtgatcgtagatattgtggaaaccggaagcactctgaaagaaaacggtctgaaggtgctggaggaggtatgtcctctgtcagccagaatgatcgtaaaccaggtcagcatgaaaatggaggatgaaaggatccggaagctgatcagagagcttcgggacgtgatcagtcagtagtttatacagacagaaaaagggggaactgcttatgcgtacagtaacgcttacaaaagagacaacaaaagatattctggaaaatcttctgaaaagaagcccgaatcagtacggcagctacgaaaccgcggtcagggaaattcttgcaaagatccaggaagagggagacggggcgctttttgcatacacgaagaaatttgaccgggcggaaatcacagaacagaatgtacgggttacggaggaggaaatccgcgaagcctatgagactgtggatccggctcttgtggatgtgatccggaagtctctggtaaatatcagaagctatcacgaaaaacagaagcagaacagctggtttacttcctctgaggatggcaccatgctgggacagaaggtaactccccttgaaaaggtaggcgtttacgttccgggaggaaaggcggtttatccatcttccgttcttatgaacattgttcctgcaaaggtggcaggagtggaccggattattatgacaacacctccggggccggatgggaaggtgaacccttccactcttgtggcagcaaatgaggccggagcagatgaaatttacaaggcgggaggcgctcaggcaatcggagctcttgcctatggaacacagagtattccaaaggtagataagattgtagggccgggaaatatttttgttgccctggcaaaaaaagcagtttacggacatgtgagcattgattccattgcaggtccaagcgagattcttgttcttgcagacgacagcgcgaatccgcggtttgtggcagcagatcttctttcccaggcagagcatgacgaactggcgtctgctattcttatcacaacaagcagagaactggctgaaaaagtaagctgtgaggtggatgagtttgtgaagcgcctttccagaaaagaaatcattcagaagtctcttgaccagttcggatatattcttctggcagaaaccatggatcaggcggtggaggctgccaatgccattgcttctgaacatatggaaatcgtgaccagaaatccttttgaggtaatgatgaaggtcagaaatgccggagctatttttatcggggaatacagctcagagccgctgggagattattttgcaggccccaaccatgtgcttcccacaaacggaactgccaagtttttttcacctctttctgtggatgattttattaaaaaatccagtattgtctattattccagggaagcgctgaaaaagatccataaagatgtggagcagtttgcagcttccgaacagcttactgcccatgcaaattccattgcagtaagatttgagggtgaggaataaggaggagctatgacaagagaagcatccattgaacgaaacacaaaagaaacagagatcaagctgaagctgaaccttgacggaaccgggtattcggacattattaccggcgtgggattttttgaccatatgctggacggatttgccagacatggactttttgatctgtgtatccgtgttcacggggatctgcaggtagacgatcatcataccatagaagatacagggattgttctgggaacagccattaaagaggcagctgcagacaaaaaaggaatacggcggtacggaagctgtattcttcccatggatgaagtgctggtactctgtgctatagacctgtccggacgggcttattattcttcagacgcagagttttcctgtgaaaaaatcggagatatgtcttctgagatggtaagagaatttttttatgcagttgctgtaaacagcggaatgaaccttcattttaaggttctgacaaacggaaacagccatcatcttgcagaagccatgtttaaaagctttgcaaaggcccttgaccaggcgctttcccgtgatgagaggatcacggatgtgctttctacaaagggaagtctgtaaacacctgataaaaggagaaaatctatgacaaataaacgattgattccctgcctttatctggaatccggcagggcggtaacaggattcggccagagaaatctttttggagacggagacgtagaagctctggcaggcttttacagcgataatggcgcagatgaacttcttgtttttgacttttcttccggggatgaggagcatgaaaaggccattgcccggatccgggagatctgcgccgtctcagaaataccggttatggcagcaggtaatatcaaccgaatggaagatgtaaaaaaactgatctatgcaggctgcgccaaggttgctctgaatttttccaagcagagtaatatagaacttctggaagaaatgtccaaacggtttggtcaggaaaaaatgtatgtatgtatttcttctcctgaggaatttacagagaataaagatctgatcgaagattatgcaggaggtatcctggctctggatgcggtacagaacgaggtggaaaaggcttcgtccatgcaggtgatcctccatacggaggaaaatcataaagagactctgatggagcttatgaaacaaaaggctgtgggcggtttaagcggagcttttgtaagcgcttctgacacagatcttactgaatttaaggagctgtgcagaaaaaacgggattcccgtgaatatttctgaaagcgcgatctcatggtcggaatttaagctgaacagcgatggtctgattccggtagtggttcaggattataaaacagacgaagtgctgatgctggcctatatgaacgaagaagcctttcagaccactcttgacagcggaaaaatgacctactggagcagaagccgtcaggaactgtggaccaagggattgacttcagggcatgtacagtatgtaaaatcccttactctggactgcgataatgatacgattcttgcaaaagtagctcaggtgggcgctgcctgccatacaggaaacaaaacctgtttttttaagccgcttatgaaaaaggaatatgacgataccaatcctctcagggtctttcaggaggtatatgatgtgatccttgacagaaaggaacatccaaaggaaggctcttataccaattatctttttgataaaggcattgataaaatcctgaaaaaagtaggagaggaatgcacagagatcgtcattgctgccaagaatccggacaaggatgaaatgaaatacgaaatttcagattttctttatcatgtcatggtactgatggcagaaaggggcgtgacctgggaggagatcaccagagagctggcaagaagataaagacataggaaaggccgggtttctggccttttgtcatgtataaaggagcaaacgtatgaaacagaaaaaatattctcatgtaagaaaaagtaactaccgtccgcccaaaaatcattccccgcaaaaacatccggaaaaaagaatgcgggaggagcgtgagtatgtaaggagcgtatcccgttccagatcagctgctgacagaagaacagcctctcggaaacatgcctcgtcttatggaagtgtgccggaacgcagacatccccggaagcattcctcgccttcaagactgatcttgtggaaaaaaaccggaaaaataaaagcaggtcttctgctgctggtaatctgtatcataggatgttcagctatttttctggtgcgcagtctgggaaccggggaagccggagatcataaaaagtccgtgcagactgcagccaaaaagaatgatgcccaggatcagccccttgatatgcagaaaacagaagagatcgcttttgatccccgaagtacggaggcgaccagaccggagaagctgatcgagtacacagagctggaagtagacggaactctgatggagaatgtggatggctacgctgcggatcaggaaattgcttttggaatgggagacaagtacacaaaagcagatgggatcgttactttccgcggaaataatttccgggatacggctgcgtttggaacagcagatataaaagaaaatactctgtccaaaatctggtcaaaggatacgggttctctttcttcaggagatacggtgtggaccggaagcggatggaccggtcagcctctgatgcagaagtggccaaaggagatccggtcccatatgaatatgtacgactgggcgaaagaaaaagaaaatcttgtggaagtgatctacgcctgcatggacggatatgtttactttcttgatctggaaaccggaaaagaaaccagagacgccctgtatcttggctataccttcaaaggttccggagcgctggatcccagaggctatccgatcctctatgtgggagcaggatataacagcgatgagggaactgcccgggtctttgtggtgaatcttctggactgcagcaccatgtatacctttggggacaatgatgaattttctctgaggggaagtctgagcttttttgattcctcacctttagtggatacagaaacagatactttgatctatcccggcgaaaacggcattctttatcttattaagctgaatactcaatacgatccggaagcgggaagtctttcgatatctccgggaaaaactgtgaaatggcactactacggcactagatcttcagaagaaaccttctgggtgggaatggaagacagcgccgccatatataaaaattatatttttatggcagataacggcggaaatatgatgtgtcttgatctgaataccatgaagcttgtatgggttcaggacattctggatgattccaattcaacgccggtgctttctgtagagaacgggcatctgtatctttatgtaagcacctctttccgactgggatggagaagctatgattctgccaccattcctgtctggaagctggatgcggaaacaggtgagaccgtctggcagacggattatcagtgctataccgatgacggcgtttccggcggtgtccagtccaccattgcctcaggcaaaaataatctttcggattatatttatgtgactgtatccaaaacagaggacaatgcctccggcgtgcttcactgcctggacaaaaaaacaggagagcttgtgtgggagcataagtcaggctatgcctggtcctccccggtgtgcgtgtatgataaaaagggaaacggcaaagttctctactgcagcagcgatggaaatatgtatttccttgacggcaggaccggacaggtatacgacactctttctctcagcgaaggtgtgattgaatcctccccggccgtctatggaagcacagcggttgtgggaacaagagactgcaagatctggggtgtggagcttcagtaaaaaagtatattctggtgatttaaaaggatggttttccggaaaacggaacgctgtccttttttgagtttttcatccctgagaaatcttcagacaaacagaataggagttttatctgaaaataaaacatatacaaaaaacatctggtaatatataatgctattataaattacagacaaagaaaaggacgcataacaggaaaaggatctgaacggtaaatgaatccctgaaatgctgtattttatttctgatatcatgctgtaggatatggatagcgattggaatgttgatgattcagtatatgtaaaaaatgagaaggagacaggtttatggaactgaaaaaggtatggatgtccctggagaccgggaagaaaagtcaatatgggtatcgggcggttggcggtattcttggaattgtgtttctgatgacagtgttgctttttacaggaacgtttctgtctctttcttttggattgcctcagcaaagtttttctatgattctggtactttttgccactgccctgagtattgcgctggcggtacgtatgggatatcggggaatgcaggatgccacatttttttttctgacagaaaatgaccgtttatgggttatggatgcccgcgggctttccagtcatggggatggatttctgggattcgctatcagctccatggaaacccaggcgtttttacgcaggcaggggaaacagccttttctcccaaaaggagcagatgaaatcctgaaggtattaagtattaaagaaaaccgcagtcattatgctttccgatgccaggcatgtcattctgacagacatgtggtgcggcgcacgtattttctggttaaaggaattcaggatgaacaaatgctgttacaggagctggagcggagaaaaacctgggagaatgtgctggagccggctgagaacagaaatcctctgtatattcttctcagcggagctgccttcatcttctgtgttatcctgtgtattctgagccatccgtctgttgccaggatgtccggtgagatttattttccctgtatgggagcttctatggtaacattttgttttttgctttactttattatccgccagcaccgtggcgaataaatagcaggaatatggtttgaatttctttaatgataagcatcagccgcattgtaaaaatagaggatacagaaaagaaaattctgaaaattactgctgagtttgtgaaattccacagttacagcttcttgaagcattgcatggcaaaatccaaaaggactatgaaatttgaaataacaaaagagaggaaaaggacttgaaaaaagcaattatatatatccatggaaaaggcgggaatcatcgggaagctgaacaatacaggcaaaactgtccggagtgcaatatttacggggtggattatcaagatgatttcccctgggttgtacaggaaaaaattctggatgtttataaccggttaaataaaaaatatgactgtatttatgtgctggcaaacagtattggcgcttatttttccatgcataccctgcaaaaagctgatattaaaaaggctttttttatatcaccgatccttgatatggagcgcctgattctggatatgatgagatgggcagaggtatcagaggatgaattggctgaaaaagaagagattcctacagattttggagaaaccctgtcatggaaatatttctgttatgtcagagagcatcctatatcatgggaaatacctacagagattctgtatggggaaaatgattctatgacaacacttcagacagtgaaaaagtttatggattcacatgaggcacaccttacggttatgaaaggcggagagcattggtttcatacgaaggagcagcttgcctttcttaatgactggatgagaagtgttgtctgacagcctgagaaaaagatgatgaaagtctgcaggctctcagtttgcaagataggaggaaaaacactttatgtttggatttaaaaagaaaaagcagaaatcattgtggatcatggcaaaagatgtgatggatcttattcaatcagattatgaggcagatatgtcttttaccctgatagaatttcattatcagggaggcgcgtatcttatgggatcctgtatcattcccccggatgcagaagaacggaaggaaaatatatcttttgtgtttcaggatcaggcatatcagacctttgaagagtttcaggaaaatgcctgtatcggggggatcaagatttatgaactggaagaacctgttgagattgtacgggcagggatcgttggcaatgacacaatgcttaagactccatggggtgacaccagactggccaaaaaggctttgagatagtaacatatgggagaaaaaataatgaaaagcggcagaaacaaagaaaaaataatagagcttatatcaaactttcctgtgatacctgggcacagagattccggatgtggtttgaaaaaaaggcttatgtggaatccgatgaaatcgactgacggcgtagaaaggaaataatacatatgaaaattctcctgattgaagatgataaagaaataagcaaaatgttacgcagctatcttatgaccgaaaattttgaggttgtttgtgcttcggacggacaaatggcctgtgaggcttttgacacagacacttacagtattgttctactggatctgatgattccgaaacttacaggtatggatgtgatgaaacacattcgtaaaaagagtacggttccgatcatcattatatcagcaaaagattcagattcagacaaaaccctggggcttggccttggagccgatgactatattacaaaaccattttctgtaacagaagttatggcgcgcattaaggcaaatatacggaggagtaccgaatatactgtcatacagccggagcatacgaaatttgtatggggaaaactgactatggatctggaaaatcacaccgttacaaaatcagggaagattgttgagctgactgcaaaagaatttgacattttacgactgctgctggaacatcctcaaaaggtttacacaaaggctcaactttattccatggtctggaatgatgcctatatgggggatgaaaatgctgtcaatgtccatattagccgtttgcgaaataagatagaggatgatccccggaaaccacagactgttgtaactgtatggggaattggctataagctgggggcgtcggtatgagcgatgagataatgatattctgcctgactgtctgtattatatttctggccggcattgtcatatatcagcagtttgcatttcataccggaaccaaagcaaaactccgtgagatcagctgtaaattaaaacaaatacttgacagcaacagtgacgaaaaggtgatgatatttactgacaataaggtattagttgaactagcggaacaaatcaaccggatgttggaaaatcggcaaaaaataaaggtagagtaccggcggtctgaaatggcgtccaaaaggatgctttccaatatttctcacgatattaaaactcccatgacagtgattcttggatatttggaaatcatgcgcctgaacggtattcaaagcaatgaaatgatgcaaaagatagaaaataccgcacatcatgtcatggaactgatcactcagttttttactcttgcaaaattagaggccggggatatggatctgacattggaaaaagtgaatgtaaatgaagcctgccgggaaaatattctggatttttatgaactgctttcacataaagagtttcaggtggaaatagacatacctgagcagacattctatacaaatacgaataaagacgcgctgcaaagaatgatgtacaatttaatttccaatgcaatccggtacggcagagagggaaaatatctgggtgtttttttgtgggctgatcaggcacatatttatatagacattgcagacagggggcccgggattgaaaaggaatttgcagagtctgtgtttgaccgtctgtttacaatggaggattccagaaacagctccatgcaggggaatggattgggactgacaattgccaaaaatcttgccctgcagctaggcggcgacatcactttcgtaagtcagccatatcagagaacagtatttaccatcacattaaagaaaatggcctgttaaaaatacgggccattttttcaggaaagaaattcgtaagatttattcaagagttttgaaaactgaacaatctataatgttaatggaaaggagggctggacaatgccatttattttacaaacaaacaggctttctaaaaagatcggcagcaaaatgctggtcacagatgttgatattcatactcgtaaaggggaaatctacggatttcttggcccgaacggagcaggaaaaactacggtaatgaaaatgattacaaacctttggaaacctgccagcggtacgattgagttgttcggggaaaggctgacaccaaaatcttatgatgttttaaaaagaatggggagtatcattgagtttcctgtcttttacgatcacatgaccggccgggagaatttgcagcttcattgtgagtatatgggatattacaataccggcagtgttgaaaatgctatgcaaatgctgaatctgactgatgcagcagatcagccggtcagaaattattcccttggtatgaaggaacgccttggaattgcaagagctgttatgtgtaaaccggagcttcttatcctggatgagccaacaaacggacttgacccggcaggcatgaaacaaattcgcgatctgctgaaaatgctgagttcggaatacggcattacaattatgatttcaagtcacatactgtccgaagtggaaagtattgcggatactgttggaattattcatcatggcagaatgatgaaagaaatccgtatgcaggatattgaggaaatgaaccttaattatgtggagatttctgttacagatgaaaaaaaagccgcttatgttttggctgaaatgttgaaactgcataattttaaagtgtttgacaacggaaaaatccgaatttatgatcactcagtatctacgcagcagttgacaaaaacattggcgctgaacgatgtggaggttatgggtatcggaaagaaagcagaaacgttggaggattactttttgaaattgaccggggagggaaatgatcatgtttaaacttatcaggctggaatggaaaaagaataatgtgggaaagtatattcgcaatgcagtgatcatggcagctctgatctgtctgtttatttttgctctctgttatctgggaattgccaatgaccctgaaacgggtgttcctgatgcggcgccgggaaacagtgcggtttctccatcaatcgagctgtttacaagcatggcttttctgatatttaccggggtcatgctgtccgcctacattgtaaacgcctacaaaaataaaactatgaatcttatgtttttgtatcctattaaacggcagaaaattcttatttctcaaatgcttgcggtgtggatttttaattttgtggcactggtgctgacgaagctgttcatttatggctgtattttgtttggatcgcaattcatggtttcttcgtttccgctagattataacatggcgggaacagagttttatattcagctgcttttaaaagccgcggtggttattaccatgagttttatctctttgtttatcggtatggtcatgaagtcctcaaaagccacaattgtagcttcttttttgctgatctttttgacacaggccaatatcggcgacttttcgtttgcggataatgccattctgcctgttgggcttatggtactctctttgctttttgcattcctgtcggtttatcatgtggagaccagggatttaaactgaaagcagtaattataatgtcatataaggctgataaaagatgttaaaatatcttttgttttagactactacaaaattcccgaaaaaatataaaaattatcttgacagacagaaacaacaatgttatactgtgaaaaaatttaatatattaaaccgttgaagcggagataacgtcaatgatgcctttacagagagtccgggaagctgagagccggatgagaaacaaattgtcaaatggaccgctgagggtgcagtcaaatggggaaattcccagagtattctgcaacgtgtgggcatacgtcagttgccggggatatgctggtatcctgctaagtgcacaggtcattctgtgaattcaaggtggcaccgcggatagtgtcgtacttttactgatgtacgtaattcgtccttgacagagatttatttctgtcaggggcgtttttattttccggaatatcagataaatcccggactgctctgggcagattgcagcgctgaaaacataatgaatttttaaagtggaggtacagatcatgaatattttaccgactttggcagatgtaagggaaattgcttcagatggagcatacaaggtaatacctgtcagctgtgagattctatctgattttataacgcctgtggaagcaataaaaattttgaaaaatgtatctatgcattgttatatgctggaatctgcgcgggaaaatgaaaactgggggaggtacacatttttaggttttgatccaaagctggaaattacctgcgcccatggggaaatgaaaatcggagatataaaactgaaaacggaacatccctccgattatctcagaaaaattcttgcagagtataaaagccccggatttgaataccttccagcctttacgggaggtcttgtcggatatttttcctacgactatatgggatactgtgaaccgacagcaaaatgtactgtggaagatactgaaaattttcaggatatggatttgatgctgtttgataaagtaatagcatttgatcatgtcagacaaaaaattattcttattgtcaatatgtctcttgtggatgtggagaccggatatcacaaagcagttatggagctgaggcagcttgccgatttgctcagaaatggcaaaaagacaagggaaacaggtggaaagctgcagggtgaagttactgaactgttcagtaaagaacagttctgcactatggtagaacgggcaaaagaacacatccatgaaggaaatatttttcagattgtattgtcaaaccgtttatctgttccttttgaaggaagccttctgaatacgtatcgtattctcagaacaatcaatccttctccgtatatgttctatttttccggaacagatgttgaagttgcaggagcttctccggaaacacttgtaaaactgaaaaatggcacactatatacctttcctcttgcaggaacccgtccaagaggaaaaaacggggaggaagacaaagatctggaaaaagaattactggcagatgaaaaagaactggcagaacataatatgctggtggatctcggaagaaatgatcttgggaaaatcagtcagtttggtactgtaaaggtagaaaaacttcattccatagaaagattctctcatgttatgcatatcggttctaccgtaagtggaaaaatcaggacagaatgtgatgcgctggatgccattgaggcagtattaccggccgggacgctgtctggtgcgccaaagatcagggcctgccagattattggacagctggaaaataatagacggggaatttacggaggcgctgttggttatattgattttaccgggaatatggatacctgcatagccatccgtattgtttataagaaaaacggaaaagtgtttgttcgcagcggagcagggattgtggcagattctatacctgaaaaagagtacgaagaatgtttgaataaggcaaaagcttctctgaaagctctgcagcttgcacaggaggtgaaggcatgatattgattattgataattatgacagtttttcttacaacctctatcagatgattggcgaaacaggaacagatctgaaagtgatccgtaatgatgaaatgacggtagaggaaatcaggcaacttatgccggagtgcataattctgtcacctggtcccggcagaccggaagatgcaggtgttcttatagatgttataaaaacaatgggaaagagaaccccgattcttggcgtatgcctgggacatcaggcaatatgtgcggcatatggttcaaaaataacgtatgcaaaagagcagatgcatgggaagcagtcgaatgtaacttttgacctggattgcccgttatttaccggctgtccccggactgctcctgttgcccggtatcattctcttatagcagataaggatacgcttgctcattgtctgaaaattactgctcttacagaaaagggagaagtaatggctgttcagcataaagaatatccggtttatggagtacaatttcatccggaatctattatgacacccaatggaaagcgaatacttggaaattttataaaggaggccggcttatgattaaagaatctattgtgaagctcgtaaataaagaggatcttacatatgacgaggcttatgctgttatgaatgagatcatgagcggtcagacaaccgctacgcagaatgcggcctttcttgcagctttgtcaacaaaaagtacaagagcggaaacgattgatgaaattgccggatgtgcggcggcaatgagagcgcatgctacacaggtggaaaccggaatggatatttttgaaatcgtaggaaccggcggcgataatgcacacagctttaatatatctacaacatcagcgctggttgccgctgccggaggtatgaaggttgccaaacacggaaatcgtgctgcatcttcacaatgcggtacagcagactgcctggaggctcttggcgtcaatatccgtcagagtccgaaaagatgtctggaactgctgaacgaggtgggaatgtgttttttctttgcacaggaataccatacctcaatgaaatatgtgggtgcaatacgtaaagaactggggttccgtacggtatttaatattctcggaccacttacgaatccgggaacgccctccctgcagcttcttggcgtatatgacgagtatcttgtagagccattggcgcaggtactgatcagccttggaatccggcgtggcatggtggtatatgggcaggacaggctggatgaaatttccatgagcgctcccacaaccgtgtgtgagattcgggacggatggttccggacttctgtgatcacgccggaggaatttggttttacccgttgtacgaaagaagatatgaaaggtggtacaccagaagaaaacgcagaaattacactttctgttttaaatggagaaaagggagcaaaaagagatgccgtattattgaatgccggcgcggcactttatatcggcgaaaaagcggagagcataaaagaaggtattatactggctgcagaaataattgactcagggaaagcattaactacattacgcaggctgattgaagtcagtaaccgtacggaggtatgtatatgacaatcttagaacaacttgcggattatgccagagagcgtacagaacagggaaaaaggaaacgatcgctggaagaactgaagaaacaggcactctcattgccagataaaaaatttgaatttgaaaatgcaataaaaaggccggggctttcttttatttgcgagtgtaaaaaagcttccccttccagaggaattatcgttcacgactttccgtacgttcagattgcaaaagaatacgaggcggctggtgtagaatgtatctcggtgcttacggaaccgaaatggtttcttggaagcaatgaatacctgaaaaggattgctggcgcagtttcagttccatgtctgcggaaggattttacagtggatgaatacatgatctatgaggcaagagtgctgggggcatcggcagtgcttttaatctgttccatattaagtgagagacagattaatgagtatatcagcatatgtgatgagatggggctttctgccttggtggaggctcatgacgaacgggaagtgacaatggcagtacaggcgggggcgcgtcttatcgggatcaataatcgtaatctgaaagattttactgtggatacacacaatagcttccggttccgggagatgattctcggagatattctgtttgtttcggaaagtggtatatctaccggtcatgatgtaaaaaaattgcgggaaattggcgcagatgccgtgctgatcggagaaactctgatgagagcagagcataaaggagcaaaacttgccgggttaagaggggttatatgacaaaaataaaactttgcggattgtctcgcctgtgtgatatcgaggcagtaaatgaactaagaccggaatatgtagggtttgtgtttgtaaatacaagtaaaagatatatttctcaggaaaaagcaaaagaattaaaaaagcggttggccccggagattaaaacagttggagtttttgcagataaacatcctgaacagattgcagagatctgcagaaaagggatcgtagatatggttcagcttcatggcggggaggatgaggcgtatatcagacgattaaaggctcttatggcacagccggttatcagggctttctgtataagaacagccgaagatgttgataaagcggaaaagtgttctgcagactatatcttgttagattccggagccggatcgggaacgacctttgactgggagctggtacagaatgtagagagaccgtattttcttgccggagggcttcatatcggaaatataaaaaaggcagtggagcaattaaatccatatggggtagatgtcagttccggcgttgaaacagatggatggaaagacaaaagaaaaatgcaggcattgattgcagcagtcagaaagaaagagggatgaaagatcatgacaaataaaaaaggccgttttggcattcacggcggacagtatataccagaaacattgatgaatgcagtgactgaactggaagaggcgtatgactattataaaaacgatccgaaatttaatcaggagcttacagagcttcttaacgaatatgccggaaggccgtccagactgtattatgcagaaaagatgaccagagatttgggcggggcaaaaatatatctgaaacgtgaagatcttaatcatacaggagcccataaaatcaataacgtactggggcaggctctgcttgcaaaaaaaatgggaaagacgagactgatcgctgaaacaggagcaggtcagcatggagttgcaacagcaacagcagcagctcttatgggaatggaatgtgtggtgtttatgggtgaagaagatacgatccgtcaggcgcttaatgtgtatcggatgcgtttgctgggagcagaggtaattccggtaaaaacaggtaccgcaacgttaaaggatgctgtttcagaggccatgcgtgaatggacttcacgtatggcagacactcattactgtcttggatccgttatggggcctcatccgtttccggtgattgttcgtgattttcagtcagtgatttccagggagatcaaagagcagatgattcagaaagaaggaagactgccggatgcggtggtagcctgcgtggggggaggttccaatgcaatcggaagtttttatcattttattgaagataaacaggtacgtctgattggctgtgaagccgcaggaagaggaattgatactgctgaaacagcggctacgatcgcaaccggaaaacccgggatttttcacggaatgaaatcctatttctgtcaggatcaatacggacagattgctcctgtttactctatttctgccggacttgattatccaggagtaggaccggagcattcttatctgcatgatatcgggagagctgaatatgtgccggtaacagatgaggaggcagtgggcgcatttgaatatcttgccaggacagaaggaattattcctgcaatcgaatcggcacatgcagttgctcacggaatgaaaattgcacctgcaatggaaacagataaaattgttgtgattaccatttccggcagaggcgacaaggactgcgcatcgattgcccgttacagaggagagaatatttatgagtaaaataagtaaagtatttgaaaaaggaaaggtgtttattccgtttgttacatgtggtgatccggatctggaaacaacggcagaagttgtgcgtgctgctgttgaaaacggagcagatctggttgaacttggaattccgttttctgatcccactgcagaaggacctgttattcaggaagccaacttaagagcattaaatgccggaatcactacagacaaaatttttacatttgtaaaagaactgcgaaaagatgtaaaagtaccattggtgtttatgacctatgcgaatgtcgtattttcatatggtgtggaaagatttgtatctgaatgccgggagtctgaaatcgacggattgatccttccggatcttccctttgaggaaaaagaagaatttcatccactgtgtaaacaatatggcatagaattgatttccatggtggctcctacttctgaaaaacgtattgccatgattgccagagaggcagagggctttatttatattgtgtccagtcttggcgtaacaggaatgaggcaggagattaagacagatctgtcttctatagtcaaggctgttcgtgagaatacgaaaattccctgtgctgttggatttggcatctctacaccgcagcaggcaaagaaaatggcagagtatgcagatggcgtaattgtaggctctgcaattataaagcttttagaacagtatggggaaaatgctccacagcatattggcgcttatgtcagagaaataaaaagcgccctttaaaaccacagagaacacatggtttttgtccggcaactcggagaatggtcaattcagtgatgaaggataggggtttccattcttgcctgtttatttgtgatgggcatttagatatacggcgggttttggaaaaatttgctgagcattttcacgagctgtacggaaatcagaaagatagttttctggaagaggaagggcggcgctattttcttctttatctgcgccctatcatcaatggaaccggaaactactatgtggaagtttgtgaaacagaatacagagaaccgccggtaaaggcggttttcttcttttaaaacagcgggggaacataatatagaaaaactgttaaaactattttgcgattgtaccgatagaataaaccctctggatatttgcatctgtccaaaaaatttgcttgaactctctttataataaggatataatattttgggtttatgtgccattccatcatctgttcttctgtttcatagcaaaaagtatcagacaggtcaaaagagtttcaggtagttcagaaaatggaagaacgctgtagataataatgcataaaaatccatgctgtatgctgtcagatactataagttacaggatgtataattatacattgtgttatgtaatggaaaaaagtaaactacgaaaaaaagagcgacgtattttgttggcattacacaaaaacgaaaggagatatatgagaaaacttgcattagatgatgaaattttaatgagcattgacaaggccgcccgctatatcggaggtgaggtcaactcagtgatgaaggataagggtaaggtcgacctgagattctgcatggcgttcccggacgtctgcggggggagatgtccagatagtattatttagtatatatagtgttggctaatgatggatagtacaagatatagatacagaatggcattaaaaaacactcttcaacactagatactactatgaccatgaccaaaatatgaccacttttagcaaaaaacagttaagaattttatacaaccagtaaacaaaaatatgaataaaatggcctaaatacctcaaagcattttatcgagtatttatgaaagaatatatcaggattaaaaggtactttgcagcaaattgcaaggtacttttttctataagaattaagaaaaaagtcaggttgtgttcagcgattagagtagatataatagtaatagatgatgaaaatgggagagataaatatgtaaccccatatttgtataagacatggaaagaaggaaaacaaatggtatataactgctttataaaatgtcaggtatgcggcagtataacaaggattagattacaggttggatggcaagatgaacatcctatagttattgcttgtgggaaatgtggtatttcattaattggtaaagttaatattggacaaaatacgttgggagtatctttctcttttgataatgcaaatattgtagatgattcagaagcagaatatctagtataacgaatattaaataattgctatatcaaacggatgccgcttcctcttcactgatttcatccattttatatttccagtgataaatcacaggttcacgatttacttcatcaaaatacctgtaaattcgctcttccaattcctctttggtattgacacggattccacgaagcatctgccgggtcatcttactgaaaaaactttcaatcatgtttaaccatgagccatgtttcggagtaaacacaaatttaaaacgtccctttggcagcgtatccagaaagcgccgtgtttctttggaagtatgcgcggaatgattatccaggatgatccggattgtatcctgtgatggatattttttgtccagtatctttaaaaactcaataaaatcagaactcttgtgagtctcacttactaacgggatggcttctcctgtaagcagatcaatgcctgccagcaaagagagcgttccaagacgtttgtattctgcatcacgatatacctctccgtgttccggtgtcgggcgtaaatccggtgcagtattggagattgcctgaatacccggtttctcatcataggacaccgtaatcgtcaatttataatcgtctggaacaatgagatcaccattctcatcaaactgcatttcaatctgtttgtagaccagcaggacttcatgcatttttgattcaaaatcaggatccctcttttcgcagtaatatttgattttaaagggtttcatatcctgttccctgaggaatttctggatataaggtttcgtaactgttgaaagtcttggatatcccgcctcctctgcatgtttctgaatgtatttatggagagaagccaatgtccacagttcctgcgcataaccgagttctgccggtctctgacacgcaatactgatcatccatgccttcgcatcgtcggtgatttcggatggacgtccaggacgctgaacatcaaacagtgcagcatccacaccgcctttatgaaacttcgaaacacaaaggcgtaccgtggcagtgctgattgcaagtttatcagcaatttcctggaatgtcattccatcggctttatataaaagaatcctggcacgatccacgacttgtgcctgaatggttctcttttttgataatgatttaaggtaattcctgtcttcatctgacagaggaagatatgtttttctcatagcgatcatcctttctttgataacactattttaccatacatcatctcaaaaatatatagcagaaatttaatttattctatactagggcggaaaatagtgaaggcagaagaaattcgacacgccagtgactatgatacattttatattgcctccaaagaagtaacggagcaacagattaaaactgcggaaatgctgctggaattagcaaagaagcatttagaaattgaataaagctgttttaacaagtattaaaacacgagagtaagaatctgagtagatttttgctttcgtgtttttttatttgtctcaaaatattttttaatctttccgaaaaaattcatgaaatttacagaaaagccttgtgtacagacttcttatttactgaagtttggtacattgacaactgaatacggtaatgagctgaatcgttcagacgggatgaatgcaggataaaacaatttggagggattatatgttgatgttaggagtttgctggatgaaacaacacagggaagataccatgaaagaattgggggcgaatatatgggaaaatcgggtgtaataaatcaagattttaaaggagaagacaatactgcttaccatgatgtgatccgtctgtttaaaatataccggtctgtaaattgtaagtaagtaatcatccgtatctgttttttcattttttattctgctacaatctccttaaaactcaggaggtattctatacactatgaacaaagaagaaaaagcaaaactctgggctgtagtgctgttgtggtcaagcatttttgtaacacttgtggctaaaaaaatatcataaatcaattatgctgcattccgtgtttcaaaaggggtgcgataaccattgaaactatggggacgcacatgattgtaggcaacatatgcgaattcctcgacagtctgataaagcgcttcttccgtagtgaattcatacaagtttgtgcactcatttttcaatgtgttgaaataacgctccatcggtgcgttgtcatatgggtaacctgctttgctcatgctttgcgtcacatttaccgattcacagaattcggtaaatgctttcgacgtatattgtgttccctgatcagaatgcaggattatcccttctttgatagatggttgtgatcctaacgcctttttcagcgtgcggacagcaaggtcactggtgatattccggtctgtgatactcgcgatcacgctgcggtcataaagatccaggatcgtgcagttatacctcacctcatggttctttaaaaacagatatgtaaaatccgtacaccatttttgattcggtttttctgcagtaaaatcctgatgaagcatgttatcaaacactttatgcggtttggcatgtccgcaaaccggctttttaggacgtacaatggaaaataatttcatctctgtattcatgtatttatgaatggttgttgggctgtagcgatatccttggcgtgccagataaactgtcatgctccggtatccatccacacctctgtgctcatggtaaatctcccggatttttgcctgtacctctgatttttgggtatcataatccgccttccggtgtttccggtagttataataagcatttgggcagatgtcaagccgcctgagcagccagcgcaagccaaaatagtcatggtatttttcaataaaccgataagcctctaatcgatttcttttgcaaagaatgccgccgctttttttaagaaaagattctcctttcgtgattcttcaagctctttccgaagacggagattctctttcatcaactcagcttcatttggggattctggatttaaaatggcttttgtctggcattcttcgctaaattcagcacaccatttagagatactggcttttgatacaccatactcagcggtgatgcttttgtaagtacgtccttcttccagatggagacggacaattttctttttaaattcaggtgtgtaagtttgtggcataatagttcctcttttctttctgagatgattatatcttattagccactactgttacaactttattgtaccaagtcgctagcgcgacggctagtcctaagtacgtggttctattactttttttcaaagaaatctgttttcctcaaaataaaagtagcagtttttttatatatgttttattgttgaatcaccacaagacaacctaaaacaatacaaaaaaactgctatgcttatgttatcatggatttttaaacttaacaagtacatattttacttttttatccgtccaccgcctgttttgaaatatcctgactctaaatcaatcttatttcatttacaggaggttccttatggacaaatatttatcttctttcagggagatggtctccctgcgcggtcttactgaccacaccattgcttcgtattctacctatatctccgcttatctgcagtacctttccgacaacggccccactgcaccggaagatgcatcatggcagcagatgcgggactttatcttttgggtccagaacacaagaaatctttctgaccgtacgataaatgcctgcatctcacagctgagattttttacactttatgtcctccataagccctgggacccctatcagctccctttcagaaaatttgactcttataccccttttatcccttcacgtgaagaaatgaaaacattcctgttttccatttctgacataaagtttaaggccatactctgccttatgttttcttccgggctgcgggtgggcgaggtacgtcatctgaaatgctctgacattgaacattccagaaaacgtattcatatacgtgcttccaagaaccgctctgaccgttacgtgcctctttctgataacgtctgggaactcatcctccggtactggtattcatttccggctggttcccggccgaaagactggctctttccacagaagaaaaaaccggacagacccatcgatcaccagcgtatccccagctttatccttgcacacgaaaaagaactcggatgggagcaccgttttacctgtcacacattccgccatgcttttgccacctaccattatgaagacggaaccgacctgctcactttgaaagcgctcatgggacaccggtctgtttcttccacggttatatacgtacatctggcatcaaatgctctgatggcttcttccaatccttttgacagaatggcaggtgggttttatgagtgatctcaaaatccagaagatctggcagtgttcttttgactcttttctttcttccgggcaccctgtttctgacatccagaaaaaagtctcccacgctgtcatgcgttgtaaatccggcgctctcggagccaatgcctgccaatgtaccgagtgcggccatacggaattccacaataattcctgccgtaaccggaactgcccaaactgccaggctgtcttaaaagaaatatgggtggataaacgccgggaggaagtcattgatgcaccgtattttcatgtggtcttcaccctgccccatgagttaaacccgcttatttattgtaaccagaagcttctgtacgggctttttcacagatgctgtgccgaaacacttcttgaattatcttacgataagaagtatctcggtgcgacacctggcatcatacaggtgctccatacatggaaccaggagatcggctaccatgtgcatatgcactgtattgtttctggtggcggcctcacatatgacaagaagatacgcaggtcaaaaaacaagtttttcattcctgtcggggtactccgggataaatttaaagggaaatatctttcccagcttgattccatgtaccggaaaggacagatcgttctctcttcttcctgtgaaacactccggaattcctatgagtggaaggagttcaaaaatgatctttacggcaaagactggtgcccttacataaaagaaacttttaacggatttggcaatgcgctcgaataccttggacggtatacccataaaatcgccatctccaacaaccgtatcctttccgtcacggaaaaggaagtcacattctccgccaggggaaaaaagcccggcgagtccaggcgccagatcactctggagcatacagaattcattcggagatacctgatgcatgtgcttccatccggttttcagaagatccgttattatggtttcctgaacaaccggatgaagagaaaaaatctgaaactcatttttactctgcagggacaccagcgttttaaaagacggtttacagagatgtccatgtctgagcttttaaaggctgtgtgggactttgatatttctatctgcccggattgtggacatagttccatgaaacagctgggaaggtgttatgcaccatcctgattatcctgacttcttatattgttttgaaaaagcctgccaacgggaggctttgaaagtatgtcctgcaatgttttacatcacaaaaatcagcgtgttttcagctgatttctcatcatcttcgacgattttggccatctgggaacaatacaatccccatataagaactggctaaaataccgcgactgggtacaatatgaaagaatcacattcagagcagttccgatttattgcagaactgctctttttgtcaactctgaatctgatactttcctaatgaattatagcactacagcccttgtttacagcattacagaaacggcacttctgaaccatctgaaaccatacgcatatctgacttatatattggatgaactcagaaaaatgggggcttttcctaaagaggaagaattaaagaaactgcttccatggtcagagaatcttccggaatactgccgtactaatctaaaaaaataataataagccatctgatagagaatctggcagacagccaggagcagtatcagatggcttttataaaatgtcaatatacgaatgattacctacttactgtaaattggagaatgcagattaaggtgaatcaagtaaagcatagggtacaagaagagtatggtacaaatctggatgaatttttggatcatatttatcaggccggcatggatatcaatcaggatttagacgacatgaagcagcgggttgaggcaatcaatcaagccaataagtttttaaagctgatagatgaagcagtagaattgatgcggaagtttcatccgcagggcgaacgttattactgggttttatattacagctatatgtcagcaaggaaagcggaaaatatagaggaaatattagaccatttggaaccacatttcccgaaaattaccagaatacatcgggcaacttattttcgatggcgtgagcaggcatttcaggctgtcagcagcattttatgggggtatgaggatgagagcagaaagctaattgagtcttttaaaaataattttgaagaggaatagcgattctgttgacgtagcaaatacgaaaaatttatagtaggtgcaagtaatgaatgcgcataaattacgcaataagttttttatggtttgtaccggaaaggagacagagaatatgtttatgatgccgattgacacaggaaacaaagcaatcaagacagaaaattttgaatttaattcagggatcacaatgctggcggacgttccaggagaaaatgaagaagccttaatgtatcagggcagatattaccgattgagccatgagagaaatgtatatctgccggataagacgatggatgatcgctattatctgctgacactttttgcgattgcaaaagagttggaagaaatgagccattcaaaatcatttataccgggagaactaataagcatggaccttgttgtaggacttccacccttgtattatcgaggacagtataaaaagtttcgagaatacttttaccgggatggaaaaatcgttcactttgtatatatgggaaaatcataccgagtgactttttcaaacgtgtttgttcatatgcagacgtatgccgcatacttgtatatggcaaaagaattaaaattatccacttatccgaaagtgttgatgattgatattggtggatttacgatggattatatgttgctggaaaaaggcatgattttgtggaactatacagattcaaccggaaaaggtgtgatatccatgtatcagagggtgaataaaggaattcgtgaaaagtttgatttggatttgaaggaaaacgatattgactccattttgaagggcgaaaactgtatgtatggtgaaccaatccgaaagcgtgtagaagaaatcgttaccgagcacgtagaagaaatgttgggaatgttccgggagtgtggcattgatttacgttcgtcgatgataattttcgtgggcggaggctcgattcttctatccaagattattgaagatgtgtggaagcgctatgacggagaatattatgttgtaaatgattccaaggtcaatgtacgggggtatcggaaaaaatatctgtttgatatagggatgcagtaaaggagggagtccttatgacaaaacaggatgaataccgttttaatttgaagtttgacgaagctgatgaagatcatagacgggtaagtgagtttttgaacaaatgtggcaggaaaaaggcaagatatattgtgaaggcagtacttgcttactgggaattgcaaagcggaaaaacgccgattgtagaacggtcagcggaaacacacatttcactaaaagagacagttattcagaaagatgaaccggatcgaggtgatcggctgattcaagtgaaagctgagaacaataacggattagatcaggaggaagctgatttaatgcgtcagaattatgcagtatttgaagatatagagtaagaaaggagctgaaaatacgaaaaccaaaagaaatgcaaggcgaataacacaggcgttcatcgttgcggtgttgatattactggtgttccagaactttttttctatcgtttatttgagtggagagtctatggaaccaacactccaaaatggaaatgcattattattaaaaaagtggggtgttccacaaaagggagatattgttactgcatatatagatgaattggattatacagtagtaaaaagaatactggcagcagagggtgatactgtcaacattgatgaaagcggggtatatgtcaatgggaaatgggcagcagagtctgtcaagaatgggcagaataatatagattttcgaatgtccgcaaatgagtattttttaataggagacaacctagcagattccttggattcacgttcttttggatgtgttggaagaagtgcaatccggggaattttgattaaaaagttattttaggaggcaggatatgagaacgaatagaatttacggattgtgtgcgttacagcttataggacttggggtgcaggtaatcaataggatggctggaaattttattatttttatatgtagcgcaggaatcattttatatgcggtaaagttggatattgaacagcgtaaatttaagatttgtccgaaatgtaagatgaaaataccgaaaaaaacacgtatctgtccggaatgcggatatcagtacggaccatccgtaagagaagaggaattaacagatatgattgagcataggcgtgatgaagaggaggcatacagtgcggatcggattgattgtgattttgaaaagatcgaggaagtagcagtagatacgtttactttatttgacggtgatattcaggagtttttggacgggagggaagataccgaggaaatattgaccgttaagcaggaaaatactggtaaaatgtaagaattcctatatattgctactgttaagattataccggaaaaatcgctttgacaagataaagcaaaaaagaaaggtataatctcaggtagaagtatgatgacggatgttcttttgcaagtattttcttgggacataaggtaagcctattaagagaagatacataaaaaagagaaaacaaatagatttatcagactgttgggaactattcctgacagtctgtttttttatcagaaatggcagttttctgtggaaatgtgtacggaaacagaaaagatgcaagataagagtgccgcctggaggtttcagcgaaacagaaaaaactttcaggaggcagaaatgaataaatatgatagcgatttaaaaacacagtttagtgcgtatgtgaaacagtcagttttgaatgcaaaaggacactacctgaagaaaaaatgcaggattgaatgtatagagacaagctatgcagatgggttgattgttccaggacagaatacagaagatttactgcgagaaatagaactgttgtctggaaaaatatttaatggaattacggagatcagaatactgttggaacaaatagaggatgcacagctatttcatgcgattattaccttgacggaagaacagaaaaaggtaattttgctccgtatattttacgaaaaaacattccgggaaattggaaggattctggagatgtctgaaaaaaaggcggagaatacatattataacgctttgaaaaagatgcggaaattactaaggggtgataaatatggaatttgaagaacttttacagtatgcaagaacgtatgataaaaaggcaatgatggatattattgaaatgtatcgccctttgctgatcagtcaggcgattataaatgaaaaattcgacgaagatctgtatcaggaattggtttacacgatgcttttatgtattttaaaatttccatatatccctacaaaatgggaataaagagaggataaacactatatatagtgcgtgaatgattgacaaatacgatatattgaactatgataagagtgatacaaatttttttcagacaacagattctggaaaacattgtttttgtttcagcgtaggttgaaactgaaattgaacaaaatcgctgcgcgatggcctgccaaggctgtggcatagcgattttctgttttctataataaaaaacagtggaaagcaagtcctaaaagtagtattgttaaatcaccacaaaataacaatcaaacaggatcgaccttcccactgcctatgaaaagaataccacccttccgcttggttggcaagcggttttatgacccaaatgcacctccgtgtaaagcagtgttttgattactactgattttacatggaggattttattatgtatgaaaaatatttagaacagcttgaggaagccggaaaaatccgtaacctcaaagagcgttccatcaactgctataaaaactatgtttcttactttctgaaatatcaagcgaagccccctgaagaacttacctgccaggatgtcagaaattttttgcttgccaaaaaagaggaaggactaagagccacaactctgaacctttataattcggctatccgttttttctatcggaatgtcctgcatatcctttgggatgatatcacagttccacgtatgattctggaacacaagcttccgaccgtactgactgttgatgaaatagaccgtctattagaagctgttgatgatatcaaatatagagccatgtttgcaacgatgtattcttccgggatgcgggtttctgaagtgatccaccttcattatgatgatatttcccgttcaaatatgcagatccatgtccgggatacgaagaacaggatggatcgctatacaattctttctaaacggtgtctggatatccttacacaatactggtttgagaaaggacgtccccgtgggatcctgtttcctaataaatttactggtaattacctgacagtcagtacactggagcaagtgatgcgacgggcagtatccgatgctgaacttccaaagaaagcaactccacactgtctccgtcatagctttgcaactcatctgatggagcagggagtagaacggcagaatattcaggcactgcttggacaccgtgacccaaaatccacggaagtttatcttcatgtcagcaacaaatccctcatgggaatccaaagtccctttgacaggaaagaaggtgctgattatgaataagcccaccgttcaggatattttccggtgtttttatccggcataccttgaaaagtattctccttctacggaacaggcaaaagttgcccggaacatcttgaactgcaaaaccggagcctatggtgcaaacgtcagtgtatgtgaagactgtggtgctgttcagattcactataattcctgccgcaaccgttgttgtcccatgtgtcaggctgttccaaaggaaatgtggatggatgcccgcaaagaggatgtgcttgatgcaccctacttccacttggtatttacagttcctgacattctgaatccaatcatttacaataatcagaaactgttatatgacaccctgtatcatgcagcttctgctacaatcagtgaactgactgctgacccaaagcaccttggtgctgctgtcggctatatctgcatcctgcatacatggggatctgaaatgaactttcatccccatatccatacaatactgctcggcggtggtctgacatccaaaaacgaatggaaagacaacggtactgagttttttcttcctatatgggctatctccaaagtctttcgtggaaaatatatggatgagttgaaaaatctctggaatacgaatcaacttaagtttcatggaactgccgaaaaatacagtaaccattatgtgttcaaagaactgattgatttctgttatgatgcggaatggattccttattgtaagaaaacttttaacggcgcacagtctgtgattgactaccttggaaagtatacccataggattgccatcagcaatcaccgcatcatctgtatggacgatgaaaacgttactttttctgtaaaagattaccggaacaaaggacaatggaaagaactgaccctttccggtgttgaatttatacgacggtttctgatgcatgtaccgccaaaacgttttgtcaggattcggcattacggacttctttgttcccgtagcaaacacaagaagcttactttatgccggaatctccttggatgccaaaagtatctctcgaagcttcgaggtaaggagatgccggaaatattaaaacagctttatgaaataaatatttgtgtgtgtaaatcctgtggtgggcatcttggaaaaccacagcttcgaataccacaaagatgttaaaatcttattctttcatacattttctaaagcctcaaagcttgaggttttgttgtcgtacctaatttatctgaaaacacttgatttctgtagcttctgcacaggaactcctgtataatcatgggtaagaacaaaagattgaaagtccataggtagtagctacccggacgctcactttgttcaattaggtcaaatcgaaaatggtgtaaacgaaggggcagttcactggaatgccaaaactgctttttcgtttaccccatcatcgattctaacctaaagaatttaggcagatatctgcgagtaaattcggaagaaaggcattgattgttttaggataatcagtgtctttttttgtatgtctgaaagtagaaagtatcggagaggaggacaggatagcaggacgaaagaagaatgggaaaggaggaacacgaatgaaacccaaaaaatttgtacagatttacggtaaagttgtattgccgataatcagaggaatgactgtaagatatttcagcaatggaacatggaaagaaacagcaagagtgaggcgtgtgattgaggtaacggatgcatacattaaatttgaaacagaccggattcgttactgtattgattttgggatggtagaagataatgcaatgccgatagcagcatagaaggaaaaggaaaggctgtcaaatatggatagcctttccaaaaataagataagagataaaattgctatgattatgcgactatattgcgaacctattgatattgacagatgacttccgcaaatatacaatgataaagtaaagttttgtgcatggatgagactttcatggagagccgcaaaacattacaatgaacgggcagccgcagaagggctgtctttttttgtgcgcagattaggtgtctgtcgtatttgtgcagacgggaatctgacgggaacatatagatttttattagaagggagggaagttattgacgggaaatatcagaaaacagaatacagctagtcataaagcagggaatcagtatgaactgctccccgtcaagtagacaattgaaaaaatataaaattttcctgccaacagattatttctgttggcagtttttatgctgcctgtaaataaatttcatgtttttccatcggtgttaaaattccgagattcctttgcagccgtttattgttatagtaatctatataatcttctatcattttcacaagcgtttctctgtctgtgaatcttttcccgtagtagcgttctctctttaaaatcccccagaatccttccattggaccattatcaatacactttgcaactctggacatactctgtgtcatgcctgccgcttccagttttgtgtgaaataatcgatttgtatattggaagcctctatcactatgacataatggatgagcatcaggattattggatatcgcaatgtcaaaagtgtcaaaaaccagggcattgttattgctatcacgaattacataagatacaattcgtcgatcgtataaatccagtattgcactaagatacaccttatgcttttccattccagtgtagtatttaaattctgttacgtctgtaagccatttttgatttggtgcgtctgcagagaactctcgatttaataagttttctgctatgaattgtggattggctgcctgacgtgtacatcctttgttcgcgtattttattgtggatttgatgtctttttttcggcagatacgaagtactcgtttatcatttacctttatattatgataacgttccaaatcatcccgaattctacgataccctttatctggggattctgtgtgtattttttcaattttttctgcaatgcgaagattttccatttcatgaactggtatttccctatgaagccatttataataagcagctctgcttacatttccaagtatacaaagtgcacgaattggatatccataggtttcattttcttctttgattgcctgatagatctgctcatgtcttaacaggcttagccccgcctcctctctatttcgtcgagtttttttaagaacgacacttccatttctgctttttggcgtttcgatttttctaattttaattcagcccgaagtcgttcaatctcagtaagagaagcataggactttctcttgccacgattgtcttgtaaggcatcaatcccatccttttcatacttaatcgtataattacgtgcctgttgataagaaataccatatttttctgccgtttcagcataattatgtgtatgagaaatacaatactgaacgatttcaacacgttcttcaaatgtagtttttctacctttggtcatgatcggtgttcctcctgttccggaagccttcagctcctcatgaccattatacttcataatccaattccgtagttgcgcagaagaacgaatctggtattttttgcaaatatcagcataggagcccttcccacttagataatcggatacagcatttgctttgagcgcagcagaataggttgcattttttgaagtggttataaggccatccgctccaagtgattgatataatgcgatccactcatagattcttgagggattaattcccaatcgctttccttcatgatttgcagtagttattccatttaagcatcgtaggacaatatccatttttaattcaaaagagaattttgctttccttcccataaaatatgctccctcctaaataacaagttttttattatttcacttgtctacctagaagggagcatatcatttctatctgtatcttcaaaaaagaacaggaaaaaaccttatacctggaaatgacctgaattttgcagggttgttttccaaaaagaatagcagtctgtatgacgtggatgagaaattgacagtaatgctcggactgccagaagaaatggggtttccgaatagagccgatatcagaaaggacgcagaaagatgtatcagtcaaaaagcggaggaaatgttaagtgcatcctggcaggactttctataccaatctggatgcgatacaaagagcctgcttccaatggtaaggcgcagtgaaatcagagaacgcgcagagcgttattacctacagaatggaagtcttgcggacattcacttcataccacaaatttctctggaggcttccttttcggatgctatatatttattgtttttagaatatggagaacaggcagcagagaagattgcaaggcagtggatcaagcgaaatataccgtatatttcacagcagagaattttgtatggttgtgtgcgggacgaattccgggaaatcttggacacgccaaatgaccggattcataaaatcaaacatttgatacaagcgctgaatgaaacccgtcacaaggcagtacaggtaattctttgccgtaaaaagaaagttattcaagtgaatatgtcggtagaggagctttgtaaccctaaagggtattatttcatccgagggtgttcccaaaaggatagagcgacattggagcgaatgtttgggaaaacggctgagtttcggattgaagacatacagagtgtgtcatatggtggaatagttctttatgaaaacgtcgcaagcaggaatgcggcataaacaatagaaataggaggaaacgaatcaatgaaaaattatcaatacttgaatctggaacagaaaatgttaagaatcagacgaaaaatgccgactcttttaaaaagattttacaatgatgaggctgattatgattttgctacgctggatgatatttatgaagccatgacaccggcattaaataaatatggagttaatttcgatattgtgcgagaaatcccgacacagtatgatgagtcagggcatcagacctatctggtactggataaagatgattactggagatatgaggcagatgtagaactttgctggacaaatgcagaccggccggaagaatgcaggcatgtgacgatccatatcaccggaacaaatgaaatcccagataaggcgcatggaacggcattgacttatggcttgaaatattatttccgcaataaattctgtatccgtcaggtgggaagtgagcaggaagatccggattatgctgagcatgatggaaagcagagttccaacacgaaaaataatccgacaaggcaggtacatggaaaagaaaaagcagtagagaagagtactaagcgggcagaaggtaagcaaacttccaacggagaaggaaaaaagtcagttgtttcttctaaaagaagtcaaaaactgaaaccgctgttaggtaatgcaccgattgtcaaagactgcgaacagttggaaatgaaatcagatgcagaatcacgcccacaggaaaaagcagaaaagcattcggaaaataaaccgagctttgatggaaaagatgaaacgatcaaaccgaaaacggaagaaaaaccggaatcagaagaagcatcattggtagaaaaagcagaaaatacggatggattcatcccggtaaatgcagaagaagttccatttgaagaagatgctgattttatggaagaacttcaggaggaactggaagatgacacatcggattcggaagtagaagcagcgaagaaattcgtgtgtgactttggcgtgttcaaaggaaaaacgatggaacaggtgatggaatccggagtgaagggcacagaaaccatgaaatggatcgtaaataagtataagggtccgaataaagagttagtaaaagcggcaaaaacacttctggattatcaaagtgaatcggaagagcttagggctgcataacagttgcatgaacatggttcctttgtagggaccatgttcttttggggaaaagaatatgacaccatttacaattacagatgtaggaacgattttgggaattgagagacttcctggtggtgatgaggcttcgtataatgtggtctgtccgttttgcggagacagaaggggaaaatgcaattttgtcgtatataaagaaggtgaaatggcgaatatctatcattgttttcattgtgatgcggcgggaaatatgctgacgttatatgcggatttgactggattatatgggacagaacgttataaagaagcataccatgagatccaaaggacactgcattttggtgtacgagaacagatcgcaaagaaactggaaatccatcgtcagaaaaagaagcagaaagaatccctggcaaaacctgcagattatgagaggcgggatcatacgtatcgggaacttataactttgttgcgattgctgccacgacataagcaggatttattgaagaggggacttacccaacaggaaattgcaaatatggaaaatgcgggttataaaagcaccagtcctgaagaatctgttgcgatagcgagaaaactgatcaaacggggatgtagactggaaggagtaccggggttcttcgtgaattatcaaggagattgggaaatttcattttatgaaaagaatcaagggtatctttgtccggtgtggactgatgaaggattgcttgttgcatttcagattcgtttggataatccttttcagaaacggaaatatgtatggctcagtagcgctaagatggaaaaaggttgttcccccggaagtccggtaagcctttccggtactttgaaatctcctgtagtttatgtgacagagggtgttttaaaagccgaagcagcttctcagagaaccgggcagccatatcttggaaatccaggcgtatccaattacaaagaactggaattgtcactgaaccgattaaaaaaacaaggagtaaaagtagtcattgaagcaaatgatatggataaatgtatgcggttagactgtgaccatgtttacaaagaaatttgtgaaaaatgtaaaggcagtaatggagaatgtccgaaaaagagggaaaaacgaaatcatattcggaagggctgcctgaaactctatgagatttgtgaaaagctggatttaatctgtaagcgtgcggtttgggatacggatgacgaaggttactggcaggaaaattacaaaggcattgatgactgggaattacgggaattatgagcaaagttaggtataggcttttgtgcggatctttgttataatataaccaacagagaaggagtgtgaataacatgggtgaagaaaaaaaacgccttccggtgggattggaaaattttgagcagattattaacgataactattattatgtggataagacggggctgatttcagaactgatccgtaacggtggaatggtaaatctttttaccagaccaagacgtttcgggaaaaccttaaatatgagtatgctggaacactttttttccatagagagagaccagagtatctatgatggattggaaatttcaaaagatacaaaactgtgtgaagagtatatggggaaatatccggttatttcaatttccctgaaaggaatcaatgcagccacttatgaggatgcatttgattttgcggttcgaatcatgaaaaaagtagcccgtaatgttcagtttcttttggggagtgacgccttaagtgattatgacaagttagaatataaggaacttttgaataataatatgagtgaggctgcattttgtggtggattgaaaatattatcggaattattggagaaacattacggaacaaaagtagttcttttgattgatgagtatgatgttccattagcaaaagcatttgaaaacgggtattatgatcagatgatctttttaatccgtagtttattggaacaggcattgaaaacgaatgacagcctgaaatttgcagtgatgacaggatgcatgcgtatttcaaaagaaagtatctttacgggacttaataacctgaaagtattgtccattacagatgaacggtatgatgaatatttcggttttacagatacggaagtaagagaaatgctgaagtattatgaaatcgaggatcattatgaagaagtaaagaactggtatgacgggtatcagtttggcggcgtagaagtgtactgtccctgggatgtattgaattactgtgataaattaaaagaccatgcggattcttttccggaaaattattggatcaacaccagcagtaatgatgccgtcaagaaattcattcaaatgtccggtaattttaaaaccaagcgtgagattgaaactctgcttgccggagaggaaatcataaaagagattcatcaggagcttgtctatccggaaatgtatcagtcgttagagaacgtctggagcctgttgtttatgacgggatatttaacacagcgtggaagggttgatgcaaaacggtataaacttgcgataccgaatctggaaatccgggatatttttgaaacacagatcatggaatactttaaagagagcgttgcaaaggacggcgatacattaagccgattctgtgatgccctgaaaaacggtgaggaaacgaaggtaggagaaatttttgaaagctacctgaaaaagaccatcagtatccgggatacgtttgtgaaaaaagcaagtaaggagaacttttatcatgggatactgcttggaatcctgggtgtgaaggaagaatggtatgtatcgtccaatcaggaaagcggtgaaggatacagcgatatcctcgttgaaaccgaaaacagtgaaacggttatccttatcgaagttaagtatgccaatgacggaaatcttgatcaggcttgtgaacgggcactacagcagatagaggaaaagaaatatgatgaggaactccgggagaacggagtggataaaattttaaaatacgggattgcgtgttatatgaaacgatgcaaagtaaaactggcagattcatgatacgtcccaaaacaatcaggtgataaaaaagcggaactgtaagagtgcagttccgtttttttatggcctgatttatgagccagaggaaaggagatgaagcatatgcacatacgggaacgccctacataagattcggggaaataagaatacacaatcacactcaaaaaccaacaggaaaggagcgttgcaattgaaacatagaaaacacagatggctggcgggaacgctggcttttcttttatcctgttctgcacttattccgtctgagaatgccgtatttgcggcatcaaaaggcagaatagcagaatcggagacaaatgtaataaaggaggaaggcagaatagcagaatcggagacaaatgtaataaaggaggaaaaaggcgatgagaatgagaaacagatcaccgccgaaactttgacgattgagcagggggaatcatttgaaatcgaaaaagattttacggggcttgccttgaaaaaaggtgaaaaagctgtattcatggatgttgtcagcgaagatggacagggattttttgcagaccgccctggtacataccttgcaacttatctggttacaccggaaaaaggagcgtgttatgaactgacaagaaaaattgtagtcagacctcgtgaaccagagaacaaaagagcagaccgtaatcagaaaagttcaaaagaggatacagaggaaagtgaccctgacccggaacctgtactgacagaagcaccggaagtgccggagaatgcggagaacttaaagctggatgtatctgcggagaatgcctcttttttatcggtagtaccagaaaccatgacagaaaaccgatctgtcaatgtgaatctggtcgtaggagaaagacttccgtatccatctaatttaggaaattattctaccacttattttacggtgaatgggcatgtggcatattgtctggagtctgcaaaatcttcgccaccgtccagtgattatgtggcaaatatctttgaaagtaacctggctttgcagaaagttctttattatggatacggaggacctggagatattactggcagttatatgccgagttttgactggaaattgaaatatatctttacacatattgcagcttcttatgcgtattgcggtacagatggattttacgggtgtacttttgaaagcgtcaaggcttcaggattatgggattacattcagtatctaaatgggctggaagcgccacctaaagcagccattgatcttaccccaacttcgacaaaagcatacgaaagcaatggagtgcagcggacagaagaatttcggctgcagggagatcatcggaattatattacattgaatctgccggaaaatgtaacgtatcatagcggtggcagcacgaaaaacggaaatgtaaaaattcccggtggtacaaatttttatttcagtgcgccgatgactgtgaccggaacatggaactccggttccttagcgggaaaaatgggaacccaatggaaaactcttgtggtctctacaggcggttctactcaggatattggatatggcacattctttgaagaagaaagcgattcggtcagttttgaagtaaaatggatggattatgcaaaagtcaaggttatgaaaaaggataatgtgacaaatgtaaatcttgcaggtgcagtttttggaatttacagtgacaaagaatgcaccaagctgattacagaaatgccggcaacaaatgaaaaaggagaaacgcaggtagaaattcctaagacacaggaaacggtatatctcaaagaaatatccgttcccaatggatataagctgaatacggaggctttcaatgtgaagctgcaggcagggaaaacacagagcctgactatttcaaatgaggaacagaaggggaaaatcacaattcgaaaaagcggagaggttctttcttctgtatccggacaggaaggaaatcttaaatttgaatatcagtcggttccgtttggagaggcaagttattctatttatgcagcagaaaaaattgtaagtcaggatcagaatacatctatttatgaatccggtgaattggtagatcagttgacaacaaaagcagacggaagcattaccagtaaagaactgcatttaggaaagtataagattgtagagcagaaggcgccagcagacctaactatcggaaagacagaggcagaacgcacacagtatgtgactctttcttatgccgggcagacggtggaattggtacaggaggagacaacttatatcaatgacagaccaaaggtaaaggtccaggcagtaaagaaatcggaaaatgacaaagtgactttagagggtgctgtattcggtctgtatgcaggtgaagacattatcaatgcagaaggaaaagtagtggtaaaaaaggataccctgattgagaaggtcacttctgataaagagggagctgcggcttttcattcagatattcctatcaatttccgctattatttgaaagagattcaggctccggaatcttattatatgagttctgaccggtatgatttcctgtttgagtatgagaatgataaaacttatacatatgaattttcgcatacgttttccaataaagaggttcgaggggaaatccatgtgtttaagattgataaagatgcggaagaatatatcagccagggagatgcagacttagatggtgcagtttacgggctctatgcagcagaggatatccaacatccgaatgggaagtcagaagacgtccataaaaaagatgatctggttgcgcagggcgtgatcaaagatggaaaagttgattttacgaatctgtatctgggaaattattatgtaaaagaaatctcacctggagagggctatcttttggatgaaactgcctatccagtggaagttggttatgaaggacaggatgttgcaattgtgcatcggaatgtgacagtgaaagaaacggtaaaaaaacaggcatttgaactgatcaagatttcagaggatggaaaccagacagaaacagagcttttgaaaggtgctggatttaaagtatttctgatccagaatctgaaaggtgtaaaagatggaagtctgaaaccatcggaaggaaatgctttcaaagcagaggattttatcggctatgactattcagaagatgaaacggcacattattacgagaatggtaagaaagtttcggtggaagaactgtttacagacaagaaaggatttgtacgttctccagaacttccatatggaaaatatgtggtttttgaatctacaactccagaaaatctccagaccatcaatccattccttgtaaccattaccgaagatagcagggaaccgcagccctggcgtgtttttgatgatagaccgatccagtttttccttaagattatcaaggaagatgcacagacacatcttccggtattaaataatcacgcacaatataaaatctatgatgtgaaaaagaaagaatatgtgacaatgaaggtgcgctatccggaagaaaaagaactggatgtatttgaaacgaatgacgaaggttatcttatgacaccggagcagttaaagatgggaacttaccgcatagaagaagtaaaagctcctgatttatatgtacagccagggtatgaaatgacgttgaaagacggagagggcgatattccattaaaccagttgtcacagacaggcgcttatgaagatgcaaagcgcgatttcattacgatcactgtgaattccgaaacagcttatgaagtagaggaagaaaccggaaaatatattgtcgtagttcgacagcaaaacgacgaagcggtaggcagtctgacaatcaagaaaacaggggaagatcttgtgggtgctaagaatgtggaagattcccttcttacaaaaatgaaaaatggcattgcaggcacaataaattctatcagtgaatttttcggcaaagaggaagtcatagaagaagacagcggctatatgttccaatatgagaagaagggagcagaaggtataacctttgaagtttatgcaaaagaaacgatttatacaccagatggacagaaagatgaagcaggtaaccgcaaagtgttgtatgaaaaagatggacttgttgcaaaacttgtgaccggaaaagagggaactgtatcacttcacaatctgccggttggttcctattatctgaaggaaacagatgttggaaatcatcattttgttctggatcctgaagcaaaagaatttgaaattaagtatcagggacaggaagtagcggtagattatgtttctatggaacttgaaaataagcgccagaagatagagcttgttcttacgaaattgtccaaagaaacaaaagagcctgtacagggagcagtatttggactgtatgcggaggaagatattgttgatcttgcagataatgtacttatagaatcgggtactctgattgcaaaaacagagtccgcagaagacggaagcattcactttgacgttgaccttccacatggaaaatatctggtaaaagaactggaggcagcaccgggatatctgaaaacagaagatacatggtcctttgatgcaacctatcagaatccagaactggaggttatcacgcttacaaaagagattgaaaatcagccgacagtagtagaaatcacaaaaactgatattacagatgaaaaggaagtagaaggggcaaaacttcagatccttgataaagacggggaaatagtagaagaatgggtttccaaaaaagagccgcataaagtgtatgcgttagaaccgggcgaatatatcctgcatgaggaggcagccccggaaggatatcttgttgtatcagatgttccttttgttgtagaagaaacgggagaaatccagaaagtagagatgaaagatgaacgtccatccggtcagctcctggttcagaagacagatgcggaaaataaggctccgcttgcaggtgtagaatttgaacttcgcaataaagctactggggaagtagttggaacactggtgaccggcgaggatggaactgcaaagagtgaagaactgccgattgcagtttatgaagagggcaaatatgtagaaccgattgtatatgttcttgtggaaacgaaaccgttagaaggctatgtagcaaacacaaaggaggtggaagtggtattcgattatcaggatgatgagacaaaactcattgaggtgacaaaagaaattgaaaataccagaaagcctggaacacctccgccggatgcgccaaaaaccggtgatcatacaaagatatggatcccggtgattattatggcagcggcgatacttggcattgtggttatagtaatccgtatccgcagaaggagaagataaacgataatgctgaaaaaatgtaacatgtaacgatggagattgtcactttaaaattgtgggtggcaatctctttttttattggaggaaaagagatgcgtcatataggagaaaagatgattttactgctctgtattgcagtctttggaattgcagctgtaaaactgatagatatagggaaagaatattatgatggacagaaagaatatgaagaactgaaggcgtacataaaagaagttcctgtatgtcagccggaaaaaatgacaggagatgaaccggaaaaggaaacagggaaggaaattgattttgaaggacttcgtaaaatcaatgaggatctagttgcctggatacagattccggggataggggtggattatcctgtggtacagggagaagataacgagtattacctgtatcacacttttcaaaaagaaaacaataaggcaggaagtatctttctggattatagaaaccatgatgattttacagatcggcgcgtgatcttatacggtcataatatgaaagacggcagcatgttcagtaatctgaagcagtatcaggattctgtgttccggaagaaatctggttctgcatatctgtatttacctgaaaaaaccttgcatttggagataacagcgtgtgaaaaagtgtccatgtgggatgatatatatgctttggaagacgatgtgtcttgcgactggccggaggaagtcatattgtctacctgtagttcttcttcagataccagactaattttaagatgcaaagtaacaaagatacagcatttaacgaatataaaataggaataaccttttagataaggctatgtttagagagaatatctttcaatgttcaagtgttataattcattaggaaagtatcagattcagagttgacaaaaagagcagttctgcaataaatcggaactgctctgaatgtgattctttcatattgtacccagtcgcggtattttagccagttcttatatggggattgtattgttcccagatggccaaaatcgtcgaagatgatgagaaatcagctgaaaacacgctgatttttgtgatgtaaaacattgcaggacatactttcaaagcctcccgttggcaggctttttcaaaacaatataagaagtcaggataatcaggatggtgcataacaccttcccagctgtttcatggaactatgtccacaatccgggcagatagaaatatcaaagtcccacacagcctttaaaagctcagacatggacatctctgtaaaccgtcttttaaaacgctggtgtccctgcagagtaaaaatgagtttcagattttttctcttcatccggttgttcaggaaaccataataacggatcttctgaaaaccggatggaagcacatgcatcaggtatctccgaatgaattctgtatgctccagagtgatctggcgcctggactcgccgggcttttttcccctggcggagaatgtgacttccttttccgtgacggaaaggatacggttgttggagatggcgattttatgggtataccgtccaaggtattcgagcgcattgccaaatccgttaaaagtttcttttatgtaagggcaccagtctttgccgtaaagatcatttttgaactccttccactcataggaattccggagtgtttcacaggaagaagagagaacgatctgtcctttccggtacatggaatcaagctgggaaagatatttccctttaaatttatcccggagtaccccgacaggaatgaaaaacttgttttttgacctgcgtatcttcttgtcatatgtgaggccgccaccagaaacaatacagtgcatatgcacatggtagccgatctcctggttccatgtatggagcacctgtatgatgccaggtgtcgcaccgagatacttcttatcgtaagataattcaagaagtgtttcggcacagcatctgtgaaaaagcccgtacagaagcttctggttacaataaataagcgggtttaactcatggggcagggtgaagaccacatgaaaatacggtgcatcaatgacttcctcccggcgtttatccacccatatttcttttaagacagcctggcagtttgggcagttccggttacggcaggaattattgtggaattccgtatggccgcactcggtacattggcaggcattggctccgagagcgccggatttacaacgcatgacagcgtgggagacttttttctggatgtcagaaacagggtgcccggaagaaagaaaagagtcaaaagaacactgccagatcttctggattttgagatcactcataaaacccacctgccattctgtcaaaaggattggaagaagccatcagagcatttgatgccagatgtacgtatataaccgtggaagaaacagaccggtgtcccatgagcgctttcaaagtgagcaggtcggttccgtcttcataatggtaggtggcaaaagcatggcggaatgtgtgacaggtaaaacggtgctcccatccgagttctttttcgtgtgcaaggataaagctggggatacgctggtgatcgatgggtctgtccggttttttcttctgtggaaagagccagtctttcggccgggaaccagccggaaatgaataccagtaccggaggatgagttcccagacgttatcagaaagaggcacgtaacggtcagagcggttcttggaagcacgtatatgaatacgttttctggaatgttcaatgtcagagcatttcagatgacgtacctcgcccacccgcagcccggaagaaaacataaggcagagtatggccttaaactttatgtcagaaatggaaaacaggaatgttttcatttcttcacgtgaagggataaaaggggtataagagtcaaattttctgaaagggagctgataggggtcccagggcttatggaggacataaagtgtaaaaaatctcagctgtgagatgcaggcatttatcgtacggtcagaaagatttcttgtgttctggacccaaaagataaagtcccgcatctgctgccatgatgcatcttccggtgcagtggggccgttgtcggaaaggtactgcagataagcggagatataggtagaatacgaagcaatggtgtggtcagtaagaccgcgcagggagaccatctccctgaaagaagataaatatttgtccataaggaacctcctgtaaatgaaataagattgatttagagtcaggatatttcaaaacaggcggtggacggataaaaaagtaaaatatgtacttgttaagtttaaaaatccatgataacataagcatagcagtttttttgtattgttttaggttgtcttgtggtgattcaacaataaaacatatataaaaaaactgctacttttattttgaggaaaacagatttctttgaaaaaaagtaatagaaccacgtacttaggactagccgtcgcgctagcgacttggtacaatcccaaataagagcaaatacttttcattttcataatagaattttctttcttacgcctgttgcagtatcagggcaaggtctacagaaagggggcatcacttttttactgtcgttccttgattattcaccggtaaagcccaagagccagtcaacggtgaacatgctttgcttaccgttgactggtcagcttcgtgttacttggaattaaacttgtaaccatatccaattactgtttttatatactcttgtcccttgcaatatggttttagtcttttacgtatttgaaaaattgtgttttctactgcgtgtaaatggttatttgtaggttcattccatatcttttcataaatctcttttttggtaaatgtggtttgaggagacgagtacaacatataaaggacttcaaattcgtttgttgataaatacacttcctgttgatctatcattacgcaatgacttttaagatccatgcatagggtatgatttatttgctttaacccccagaattgttgtaccgataatcggtcacttcttatttgttcaagtaataaggataattcattaaatttttttatttctcttaactttttatataggttaacagttatcgtacatctatatatatccctatcaaaatccaaaatatgtgtttcgattgaaatagtattatcgttatcaagtgtaggtcgcattccgacgtgagtaataccataatatcttttcctatctatgagaacagtggctacatatacgcctgattccggtaagattgtattttttcctatttctaagtttgcagtaggtgttccaacatgctttccaatacccttgccatgcacaacagttcctgttagtgtatatataggtttcaaatttcctttcattttaatcctctcatataattcctttcatcgataaaataatcaaaatacaagttgtaataataaaacctgccaatataaacagtccagtatgtttttggtaagcgcttaaatcttgggtagctttactgtctacgtttttgaactcataatgatagcaaatagatttttactacactccgcttgataggagatagaaatttactatatttggaggtttcattatgagtaataaacgtgctccaggacgttccctggacgaatggatggaactggtcaccgaatgcagacaaagtggcctgacagatgctgcatggtgtaatgaacatgggatatctcccagctgtttttacaatgcagttacccgtctccgcaaaaaagcctgtcagataccggatccagttggaaaagccagcactcttgaccttacgtcccataaacaggatgtagtccagattgctatagaaccggagtattctccggcaggactgattccagataatggaaacagtcctatgcaccttgacaattcacatacgattgaaatcgaagcagacggactgcttatacgaatgagtaatgagatcaaaccggtacttttgaagatgcttatggatacgctgaaggagtcgttatgttagcggatatctcgagtgttgatgcgatctatatcgtctgtggcagaacagatatgcgcaagtccattgatggattgtgtgcgatcatccaggaacagttttcgatggagatcgaccatgcactttttcttttctgcggtcgtaaatgcgaccgtatcaaggctattttaaaagagcctgacgggatcgttatgatctacaaaagactgaccgcccagggatcttaccggtggcccaggaataaatctgaagtccggaatcttacatggagggagttcgactggctgatgtctggcattgatattgagcagcccaaagcgatcaaggcaacgtaaaaaagatgcacataaaactcttgttttttgctgtattttcggcactttcaaggtctggtaaatccgctgttttgctgggaaaagccattgttttctggtataatggaaacatcagaaacaggaggaaaaggcagtggcagacagttccaaagatatccagctccgtgagctgaaagacatgataaacgatctcaaaaagatgataaaaacacttcaggcaactgtcgatgctgccaataaacgggaagaggctctcacccaggagcgggataatctgaaagaagagatagaccttctccgtaaaaaactgtttggcacctccagcgaaaaaaggaccctcgatattccagggcagttaaactttttcaatgaggcggagctggaacaggatccggaggctgcaaaagcagaggatcttgaagcactccttccggaaagaacagccaaaaaacgaaaatcaagagctacagatgcggaacgttttaagggagttcctgttgaaaaaaagtatctggagctttctgaggaagagaaactctgccctgtctgtggtaccccgctgaaagaaatcggggaagagtttgtccgccgggaactggtttttgtaccggcaaaactgaaagtatatgaatactacagtaagagctatgagtgcccgcagtgcaggcttcaggatattccggtcatcaaaaaaggaaaagatggcagagcccatatgctttatggaatggcttctgccggaacggttgcctgggtaatgtaccagaagttttgtaatggtctcccatactaccgtcaggaaaaagactggaaacagtatggcgtggagatcaccagagctactatggcaaactgggtgatccgaaattctgaagcattttttcttcctatgtatgaatacttccacaggaaacttctggaacggggattcgcgatggcagatgaaacgccacttcaagttctgcatgaaccggaacgccgtgtacagaccaagtcatatatgtggctgttccgcagcggtgaagacggagggccacctattatcctctataaatactcggagacccgggccggggacaatgccgtagattttcttcacggcttcaagggttatctgatgtgtgatggctatagcggatacaataaagtaccggatgccaaacgcacagcctgctgggcacacatcagaagatatctgacagatgccatccctaagggaaaagcactggattatacccagccatctgtacagggaatgctgtacattaaccagctcttccatctggaagatgtgatcagatcaaagtattcttccttcgatgctataaaaaaggctcgccttgaaaaagaaaagccggtagtagaaggctttttgtcgtggcttgatcagcagaaccctacccgtggaagcagaatggataaagctgtcacctacattcagaaccgccgctcctatctgactacctatctcgaagacgggcgctgcagtttttctaataatctcagtgaaaatgcgatccgtccgtttacagtaggccgtaaaaactggctgttctgtgacacaccaaacggagcccaggccagcgctatcgtgtacacaatggtagagatggcaaaagccaatggcgtaaacgtctatcactatcttacttatctgctggaaaaactacctgatgatagaatgagtgatgatgaattagaacttctggctccatggaaggaaaccgtcaaagctgaaatcgaacgtcgtgcaaacggatcaaatcaatcatatgtgaattgtcaaggtgctccgactactgagtttgaatagtagccggtgggccagaaagcctttatttatagggcttccgcacacccaccctaaatcattgcatttttattgcattttttaatttacctgcttgtgatagtctgcagtgaactgattgctcgtgtaatcagcgacactgtgggaagcgggtgtgtaagtaagtattccagtcagcttctttgcgacatcaaagttgctgtttggatatagatgcccataagtacccaaagttgtctggattttttcgtggcccagacggtctttgataatcaatgggttttctcccatgctgattagaagggatgcatgggaatgccgtaaggcatggatttttatgcggtggacgccagcaagttttgccagcttttccagggctcttggcagggtatgcttgctggtgggaataccgccatagcttagtacgaaattgcagtcaggaatgactttatgctgaacttctttccattccttcagttcttctatcgtatctgcatctatgacgatatcccggataccggcctgagttttcggctcagtaaaatgatattcggtcatggatttgtaatacaggcttttagtaatacttagaatacctgtctcaaaatctatatcatcccattgcaatgccgcagcttctccaattctcattccggtcataaacagaacccagaaagaaataaagagataatgttcatagtaatcacctttgtagaggatagagattactttctgaaattcttccagtgtccagaaatctactttcggctttttgcttttcacattgccaatcatgcgggccggatttttgtcaatcaatcctagaataattgccctgtcaaatgcaaggcaaagcattccctgaacaatccgcacgtaatttggactgaattcttttgccagttttaactgccaattctgtacatggattggctcaattttgtcagtattcattttataaaaatatgcaaagtgtttctggatggtggaataccggtttttgtaggtactctcttttacctgagttttataccagggaagatagatttcttcaataaagtttttgaaggacattacttcctttttttcggtaagttcctcaatggtggtaagcaataattttgagtatgcttcgcgtgcctcttttttggttttaaaattgctgcggtatttttgaatctgttttccggtgaccggatgtttccctaaattagccctgaaatagtaggttccgttatctgcttttttgatcggatcttttgccatgttttcactcctttacttaaccgcaagaagtacaattatttttcattctctggcaaagtgatacctaataattcttcaacagcttccttcggcaccctgtctaatttttttgattgataataggtatggccttttgcaatcatgagtttttttgcctccttgataatatcagcggcaaaagaaggtccataaccaagacttatcaaatcgcttttcgttacagtaaccataacactcctttctatagacaggatgagaacttcaatacctgtccattattatatcaaatttagagtaattttactatcaatcttccagaggtcagttcctatgccctttccggccacgtatacggtgttactgtgtaatcatcaaactgaaggcgcgcggaatgctgcactatcttcagtgccagtatcaaacctctggaagtagtatgcggttatcaatgtgcagtgggagccttgtcccttcatctgaataatagcgtaggatatctgtaaattgaaaattattgaaaaaaaagaaagctgcccctgcggacagctaaaattcgtttatttttttgtagtaaggcggtttagaatgggaatcacagccatcatatcgtcatcatccaactgctttaaaagggcgttcgctttctggtaaagcgggagattgtgcagctcctcatcaaaaaactgctgtggcgtgatattaaaataattacaaatttccagaaactggctcatggaaggcatggaacgtccactgctgatattctggatataacttttgtttttgcccaaatccaggctcatttgatattctgagacgttcttttttactctaagttctgtaatgcggtttgcaataaatttttcatccatgtttacttacctcacaaatatcattttaaactatttacttacatgaaaatgcggattaaaatagttataaagaaaggataactatcaatattacggattatttccgtaatttttgtattaaatacttttttgcaatcgaatagtgatagatgtacgaatttggggtatgattgtaataaagggagtggcatcaatgaagataataggaacggaacaggaaattgaatgggtgaaaaatacgcttatgaatagctgcatgaaatgtccttatatggagtcatgcaaccgggtagcatcagaggatcagaaaaaatacgggaagatcaggcatacctgttctgaatatcttgaccataatattgagtttaagattacaaaaaacaatatatagtgtatgaaatgtttgacatcagctatatcttgtgctagtatactgatatagtttattttatgcacaccccatgagggggaagttttgggattgtacgaatcccgaaataaacagataggtgaaaatacctgtctggcataagttgtttatgtttgtataaagtgtcactacatgccgtaagcggcgttatagtggcacttttgtttttttaggtgaatatgccaacgattcgggaatgaacggggaatactatggattctcttatcattcctatttttatgccatgacacagaagctgtgcaggccacaatcagcgaaacgctgtttatggataaaaaatattgtaagaaaggtggaacaagaacatgaatgaagcaagaatttatgcagatgagtttcagacaacatttgcgaacacaaaggagatgctggattttctggcaagcaggggccaaaactcccagtggatacgaaagcccacaaggctgctccggctgcttccgttggaaaaagaggcggataagctgaaaggggcttcggggaaccccatggacgatattctggaggatacagagaagaatacaaatctgctcttaaaagtgaatggagaaacttatccagtgcgcaattgtgcaattcagacgattttaagcagggcaagagtaagtggctatggcttacgggatctggagactgcaacctatgcgaaggtagtcaattactgccttaaggtggcaaaaggagatgcgctgattaagattgcagatggaaaggtgtccgcagtacatggaggagatgaacatgattacagcatcctcgatatgcgggagatttttgcaacaacgagtgaatatttgcaggtgcatttcaaaggcagtgagtatatggaaggttctggaatgtatgaccattcgattgtatctgccacatggaaattgggcggaaatcaagagcttcttgatacttaccggaaagcattacgggataatggattggaagataaggttgaagcacctgcgctcaggcttacatcatctgatgtagcggccagcggtgccaatctttatccgatgctgatctgcgagagttcaagccgaaccatcagccttggaagtccgattaagttagcccatgaaaagagagcaaccttgacagattttagaaacaatctcagtttaatctgttcacggtatcaggatgcgattacaaatctttctatattgatggatattgagattcgtcatccatcaaactgtctgcggttagtgatgcggaagattgggattaggaaaaaactcatcaaccaggtcgtagagttatatgaggcgcagaatgggactggtccttgtactgcacatgatttgtattatgcaatgaacgaggcatccttctttggtgcctgtgaaggactacagggatacagtattattaaactggaggaagaaattacaagagcactgtctttggattggaaagaatttgatgtaggcggtgcaatcaagtggtagaggttgactttggaagtttgaattttaagaattggaggaatattatggattattcagcagttacaagtacctatgaaccgaaagtaattgtagatacggatactttgtcaagagaagactggctcacttatcgccggttaggaatcggaggcagtgatgtggcggcaatcatggggatttccccttttgcaaccatcagggatctttactatgacaaagtagggatacagcctttgattgaggaagatgaagaaagcaactgggtagcaaaggaggtcggacaccggctggaagacctggtggcagaaatcttttctaaaaagacagggcttacggtgtttccagtacggaagatgtttcgccatccactatatccgtttatggtagcggatgtggatttctttatcattttcccggacggttcttatggcatactcgaatgtaaaacgtgcaactataatgcaaagagtaaatgggataatgatgggattccaatcaattatgaatatcaggtgcgtcattatctggcagttatgaatatgaagaaagcctatatcgcgtgtctgtatggaaacaatgagaatgaattcgtcatccgttccatcgagcgtgacatgatggaggaagaagacatcatcgcacaagaggaatacttctggaaagagtatgtagaaaaacgggtggaaccgccgtatactggaaagccggatctgattctggcaagcatccggagatatagcggttatgcagacaaatctatcccggagattataatttccggtcttgagtcaaaagaccttgaaaagtatctggagttatctgaagaaaaatccctgcttgaaaaacgtaaaaaagagatagaggtacagcagcgtgcgctcagtgttccctttgtggaacggttgggagctggatgtaaagctgtgattgaagatgggacaaatcgttataagatcacatacaatccaacaatccgaaggacagtcgggaaagatgcgatgaagaaattggaacttcagcatccggatatttttgaggaatataccaaggaaacggagagccggacattccggatcagaaaggaggccgcataatgttaagcggaaaaaaggcatatatctgttcgccgctttcggcaccaacaccagagggcgtcagtcataatatggaaatggcgaagttttatctattaagaatgaaacagatctatcattgccggacgtttgcttcccatgcccacttgccattgatgcttgatgattccataccggaggagcgcgctgccgccctccgtatcggaatggagatgatgaaactctgtgatgtactgattatctgtggaaggtatatcagcgcaggtatggagtcagaggttcagaaagcgtttgaaatgggactggaagtattctggtatgacagcaacaaagcgccgtttgatttgattcagattgtaagttggaaggagatcgggaatgagaggtcggcttaacagaaagatttttctcaatgaacagaatggatataccattgctgtttatacaacgaaggatacttctgtgcctcttgcagcaagaaataaatatctgacatcccaaggtacgatcggatttagtgcaatcggatacaaccttccgttaaccgatgagatagagctggaaatggaaggtgagtggataaacggagaacatggattacaattcaaggttgaaacctttatggagattgtcccccggacgaaggaaggcattattggctatttatcttccggagcaatcaaaggagtgaaggaaaagactgctgaggctatttataagaaattcgggctgcaggcactggaggtcatggaacagaaaccagaagaactgctttctatccgaggcatatcggaacgtaaattggaggatattaaggcatcgtttggtcagaacaagatattcagggaactaatgacgtttcttgcaccttaccatgtatcacccaaaaaagcgaatctgattctgcagactttccatgaagatgccatcaacattgtgcggtatcgaccttatatgctgagtgcagtcaaaggatttggatttatgacagtggatgcgataggaagacagaattacagtgacttaaatgatcccatgcggatatccggatgcgtcagttatgtattgcacgaagcgatgaaagaaggtcatttgtatctggaacaggaggcactcataaaacgatgtatggaagtcttgaataaggacttgatgcagattgcagttggggaacaggatattaatcaggttctctatcgtttggtgatgcagaaaagcattgtactggaggaaggatgtatctatatagccggacagtatgaagaagaaaaccggacggctgatatgattgcaaagcggctgctctatgaaaacgtaccgcttgatattgaacaggaacttgagttggcacaaaaggacttgggaattaccctttccgagcgtcagaaagaggctgttagaatggtatttgccaatcatatcagtatcattaccggaggtcctggaacgggaaagacaacggtgctaaaggtaattctttatattcatgagaacaagtgtaaaaccttagtgcagctcatggcacctaccggacgggcggcgagacgaatggtggaaagcacgggacagcaaaatgcttctaccatgcatctggccctgggacttctgggagatggttccgattatgaattggaattggattttgaatatcaggatgccgaatttatcaacgtggatgaggtatccatggtggacatgcatttggcgtatgagttttttcggagactcaaacaggaaacaagagttgtgctgttgggagatgtaaatcagcttccttccgttggagccggtgatgtattccgacagctcattgcctgcggcctgattccagttactgcgctggatatggtatatcgccagggaacgcagagcagtattccaatcaatgctaaactgatacaggaaaatcaaactaatctatacatgggagaagattttgtatttattccatgtaaaggtgtagaacagactgcggagacggtaaagcagatctatctggatgaaattgcccgtaatggcatggatcaggtacagatcctaacaccgtttcgtaagaaaagcgccgcaggtgtggaagaactaaatcgcactttggaagatttggtgaatccacctgccagcggaagaaaggagttgacaatcgggaaagatgtattccgggttggggataaggttcttcagaacaagaataccgagattgtcagcaacggtgatatgggaaccattcaggatttttatgaggatgaagatggaaatctgaaagtacagattctatttacggataaccggcagatagagtatgagtacgaacagatggaaatggtagaacatgctcatgcgattaccattcataaatcccagggttctgagtgtccgattgttataattccgtgggtaaaagccttttatgtgatgctaaagcgcaatattctctacacggcgatcaccagagcgaaagtgaaggtgtatctggtaggggaatggagcgcagtatgccaggcaatccatacagataacagcggcaccagaaagaccatgcttggaaagcggatcatacaatttcactccaagtatcaaagtgagcgggttcctgaaatggagcaactaaggctagcagtttaagagttggcggcaggaatagtgataagtaaaaatggagaagaagatgaagttattggtatcatttattttaggagccatgcttatgagaaagcatggaatccttgaaatgttgattgcggcaatttgtatttttatattgctgcagattttgagttgaaaggagaaggcatgataagaatatgtagacgctgcaaaggcagagtaatgccggagaaaggaaaattaagaaagaagtacccatattattgcccaacctgttatgaaaacatgttttcacttgaaaccgataagacggcattgcaggagaaggatatatgcatggggaatggatatgaaggagtggagaaatctggcggatataaatgtatgacaatggtgtttaatgacagggcctttgaagacggctggacggagccctatattgtgcatatgaaattaaaaaccttccagtcggcaggggatatagctggccaattagcagcaatcggacaggcattctatgaggagagcagttatgctgcttctatttttggagtccatcagatcatggatcggcttaaggctattcatccggaactggaatatttcattttcggttgtccgacagtgcctttcggggatgatatatcgccctataatatcactgatgacgagatggagcaggaggctgctgtatcataatctgaggaaggagcagataagaaaatggatacagttaaagaaaaagaactggagtttacaggtgacatgatggagcgtgatgacatcatggacaatgctgtgtatcagatgtgccttgcatttctcggaatagagtctgatgatacggaagataaattcccgtgggatatttctattttgaatgagatcagggaatttacggttcatttattgcgggagcagggatatcaggtatgtgatccgtacatagagcgggatgacatagaccactattgcagtccccatgtatgcggattcaaaaaatgtgagttacatccataaaatgaaaaataattttcaatctcagagaatggcagactattactcttaatgaaagggtatcgtctgcttttttctgtcttgtgtaagaaaggagcagataagaatatgaaagaattattgtataccaaatcggaggcagttgctgctttaaatcgtgtggaaggatttaatccgatggaactagcccggacaatctcaagggaaaatcaggaagatcaactttatcttgacgtaaagtatcggaagttgtggttccggctggttcatccgttagggaaaattatcagccgcatcgtgagctatacagaaaatatggcattggtggaagcaaggatttatctggataaatgtgatatcgaagataattacattgcaaattccttttctcagaaattccggagcgatgatccacagtttggagataagtttttggagatggcagaaactgcagcgattggacgagctttggcagatgccggattcggagtacagtttgccgatgttggagaggacaatgatcctgcccaagtcgatgcgggaatcaccgttccattttctggtacagcagtgccaggaacggtaggagaaccattacagggtgacaggacacctcaaaattcaggtgtgcagtctcagaatacatccaatcctgcttcttatgcaggcaatcagaatatgatgaatcagttctatcagcaggcacaggcaaacggcatgacaatgggacagcctcctgttatgccgacagtgccaggaccaggttcatcacagggcaggaatccatcaaataccggacagtaccaggccccgacaggtcagttgccgttagacggaaatcttccagtggaagaattgatccggcagatgacatatgaacaggccgtgaaggtagtgatcggtggaaaaggaaaaaatggtggaaagaccatgggacaggttgcgcaggaaaatccaggaagtctttcctggtatgcaacgcaatactctggtaacaatcacctgattccagcagcggcaagaattatattggacaaggcttttccgatggccggataaagaaacgatactccatggtcaggtgactggccatggagaaaggaggagctgatatgtacgacatgtcaggatttgactatgatatccgggatgtggttcgtatcttgaatttgcgaatccgccgaaaaaattcccattcctatgatgtggattgtcctttttgtgggtataaaacagggaagatgaatgtgaatatcaaaaagaatgtgtttcgatgcaactactgtgatgagcagggcggtatgctggatttatacggaaagttatacaacctgtcaaaatctgaggcgaacaaacagattcggcaggcactgaacttaggacaatatcgggatgattatgtcagaccgacaaaagtggaggggccacccttagtagaaaacagtgagcttgccccgacggagaaattaaatgaaacctattcgatgctgctatccttgctcacattatcgaaaaagcacatggaagatctgttggcgcgcggtcttacgaaagaacagattgccgagcagagataccggagtgtgccgctttttggaatcaagagtatggtaaagaaactgatggaaaaggggtgtaccgtacagggtgtccccggattttatctggataaagacggagaatggaccatgaacttttcggcgaaattttcagggattctgattcctattatttcagcaaaaggatggattcagggatttcagatccgcctggatcatgtaattaaagactgtaaatatatctggttttccagcgtcaattacgagctgggagtatcttccggaagcccagtgcatgtcattggaaatctgaatgtggatactgcttacatcacggaaggagctttaaagggaaccattgcccattatctttctggaaagacttttatctgtgttgccggagtcaatttgtatgcgaatctcaaagcagtgctggaggattttcagcaccgaaatctcaagtttgtatacgaggcttatgatatggataaaaagatgaaaatagattgcgaccggaattataagaaatgccgggaatgtgaaaaggatgatgattccaaagagtgtccatataaagtcaaaaagcgtaagaatatacgaaatggctgccggaaaatgtatgaaatctgcaggagtctgggattgccagtacagcggatgctctgggatacagacgaaaaggaagaatggaaaggagagataaaaggaattgatgatttgtattacacaatgaaaaaggaacacaaggagatttgactaaggactttatgagtcagggcaactgctctggctcattttgaaaaggaggataatgtttgaagaaaagaacgaattggatgctggcgcttttcatgctgattgcatttggcacttttctgtttgcggcaggaaagctgcttcaaatttatttggagtaccaaaaaggaaaagatacttatgaggaactgctggaatatgttcaggagccacaggaagatgatgaaaaagagcctgatgaggagcctgagccggaagaacctgaatccccatatcttcaagtcgattttgtaggtttgaaatcggagaatccggatgtgattgcctggatacagattccggcacttgaaatcagttatccggtagtgcagggaaaggataatgcctattatctgcagcatatgcctagtggtgagaccagcaaaaatggaagtatttttgtagattaccacaatcatgctgatttctcagacaaaaataccattgtgtatggtcataacatgaaggatcattcaatgtttggaacattggataattatcaggatcaggaactgtatcagcagtatccatgcttttatatctacatcccaggatatgtactggagtatcagattatttcctgctatgcaggcagaattgggagtgttggatatacctatggctttccggagcaggaggattttcaggtgtttcttgagcagattctatcctgcgctggatatgacacaggcgtaaatgcgacaacagaagatcagattgtgacgttatctacctgtgtgaattccaatcgggattaccggtatctgatacatggaaaattagtacagaaaatcgtgaattaggggggaagaaaaattggaaggtttattttttttaaaatatgcagaatgtattgcagatattcttttagatgaaagtgacaatgtagatgtaatcgggttgcggtttgacgcgattagaacactatttagcagggcacaacaatatgcaaagaaaggcttcttaccagaattggtggaaaccttttttacgaaaaaatcgcagatgatattgaaggcagaaacaaaaaccgagataacggagatattaaaaccgagtacgccttattacagcggaggaaaaatggtgccggaatccacgccttattacgtggaggaagaagaactgatgctttggtctgaaacttcgcaaagaggaccgcttatcagcgccggatatgaccgctacatggaattattcaaaaaactgcttccagagaaggcgaagttcctggataaggaggcgagttgagtgtgtatccgataaggtatgatacgtacacttgaaacaattggatgagaggcattggcattttgctgatgtctctttttttatatttccaaattttaattgtttgaagttgctctttacgcatctggtacgtacagaataagtataaacaaagttgaaaaggagtagaaatgatatgattaaaaaattaaggattccggtagatcacggaaacagaaacacaaaaacaggaaactttatttttacgactggcttgaacatgatggataaaaagccggccagaggtgagaagtatcttcagtatgaagggaagtattatacactgagtgaaaaaaggattccctatcagcgggataagacgcaagattccagattttttattttgacgctatttgctattgctatggaattggacgcggaacctcagattcagccaggggatattgttcagattggtctgccaatcggtctgccgcccaagcattttgcagagctttgtgaaaagtacgaagcatttttccaaggagacggaaaggtgaaggagttttcctataataacaaagtgtatcatatctgcattgacaaggtaatggcatttccgcaggattatgctgccatgatgacaatggcagaggaaatctcagagattccgaaagcggtggggattgatattggaggatttactacggactatcttttgatgcgtgatggtgagctgatgatggattattgtgattctttggagaaaggagtcattactatgtataaccagatcctctcaaatgttaatagtgaatacgatatgctgttggaggagtctgatattgatagtatcattgccgggaaaagccagtattacgaggaaaatgtggtaagtatggtggaaaatacggtacaggcttttgtgacagacttgctaaatagtatccgtgaacgaggggtggatacaaagtctacatatactgtatttattggtgggggtgccgttcttttaaagcagtttctggaaaaagcagaccggcttggaaagtatatgtttattgaggatttaaaagcaaatgcaaagggatacgattttctgtatcagatgtatgagaacaggaagtgatcggtatggaaaaaaaacatccgaacaaattcaccattggatttaatggtgatgatccatcccatcgaaaagttgtggatatcctaaatcatacgaaggaaaaggcagatttgatcactgccgcagtcctaaattatttaggagaggacagcgttcatatggtaccaggtatttccctggaaagcctgcagccaatgatccagaaactggttcagcaggaaatacaaaagactgccggcgatactgcacctcttccaatgcaggaggagccggaaatgatagatctgtcagcgaatgaaacacattgtattgatccaaagatcgctaaaaacatgttttctgcaatggatgcattccgaaagatgtgaagaatattagaaaataaaggcatagatcataataggaaagaagcagcctggtcatattcaggctgcttctgtttttttcattcttaaaatgtctacagattgtacacagatttacaacaaagagcacacagattagccttttataattagaaatgatggttatgttaggcttatatgtgggttcttattctttcgtttcccttataccggataacaggccgtgcaaggtactcagagcaatacgtttttcctcatctgtgcattggcttaattccgacatgatttggcgcatggtggtatccattggctgtttttcattacgaataatcgcatccagggaaatattcagataggatacgagagggaataaagtttccagttgcggattggcaacatagttttcgatatcggaaatagtacgcagagagacatttgcctgttcagcaagtgtattttgcgacaactttctacgcaagcgttcttcttttaccacatcgcctaataatttttttaccatcattcgtatcacctcacttagtgcttatattttaccgtaatcatgcactatatgaaatgcgttaagatgcgtgaaaagatatagtatacaagaattataatgcgtatatggtgattcgtttaggatagaacaaaggagaatgtataatttggaagatacaaaagaacgagttaatgccgtaagtctgttaaaaaaatccatatttctatatgggaacagcggacagatagacatgcagtatatgagttatacgatttccatttaatacataaaaacaaacaagttttacatagggctggatcggctataggctggatcagccttatttttatttcagaactatggaaatttatcggcaggcattgccggccaccaccacttcagaatttccaaactttaaatttgaaaattctggaggaaaattatgagcgaaaacaatgaatatacaggttctaaagtaaagaatcacttcacagcatatctgttaggctttatccatggaaaaaggagggattacctgcaaaagaagattaaaatcagtaattcagagaaacctttggatgaatttacccttaccgaaatgggacaatccattgaagaatctctagagttgcagcaaaaagaagaagtgctgatccgggaggcagaaggctgctatctgaagtggaatgaattatctgaccagaaacttatgaaggccctgatgaatctaagagaagatgaacggaaactcatttaccagcatgtgtttgaagaacaaacttttaatgaaatgagcctgataaatgggattccggaagaaaaggcaaaaggtgtttattattatgcaatccggaaaatacgcaagatgatgggaggcgagtgatcatggattttgaagaaatattattccgagcaaaagtgggtgatacgcaagcaatggaacagatcgtggagatgtaccggcctttactggtcaaaaatgcattggtcaatggtgtttttgacgaggatctgtatcaggaactaatgattgaattattgaaatgtatccggtatttcaaaaaactggattagggaaaactgatttatataaccgtaggggcagtcgatgaggctgtccctatcgttcagtttggtgttggttctggggctttttaggtcagataatacagatcggggctacggtctacaggtggagtatagggaaggtgattatgaaatagaagtacggtatgcgaattaggtgggaaaattcatagttatatgatagaatgaagagcaatgataggtttgcatttggcggagagaatcactatggatataattgaaaaattacaagataagaataatacagccgcatatagattcctcttgcaatattggatgatgacaagccgactgcagtaagacaatgtttgtctgtgcttcatacagtaatcctttataaacctgatttatgtggaagaatagaagaaaagctaaaaacattgaatttggcaaaatataagcatagtatgcatccgcttattgaaaaggatattgaggagttgcgaaagacatttgtgtaaattttggcctgttgaattgtaaatatttgaaaggggaagaaaaatgataaggtatgttgaaagggaagatattaatcagatactttccatgatggaatcagtaaaagatgattttgctggatataaagaaacagaatttttagaggagcttataaaccgattgaccaaaaagaggcatttttagatgaggaacaagggggccaggtatgatttctttaatagttgcttatgcgaaaaatcaagtaattggcaataaaggatgtattccgtggaaaataagaggtgaacaaaaacgatttaaagagttaaccacgggaaatgtggtaattatgggaaggagatcgtttgaggagataggaaggcctttacataaccgtattactattgtggtttcctctactaaagatttcaccggagaaaattgctatactgtgagttctttgcaagaagcaatcaaattagcgggagatcgagatgtttttatttccggtggagcgagattatatgaggaagcattatccatagtcgaaaaaatgtatattacagaaatagataaaactgttgacggagatacctattttccacaatttgaagagggagattttattaaagaaataaatcaacgatttgaaggtgaaattccatatacatatgtgacatatacaagaacaagagcatttgtgtagatttttaatctgccagattaaaatttgagatttgaggtacagaatatgaaagggttccatagagacaatcagttaatttccctttgtggcttgaactgcggattatgtcctatgcacttaaataaatattgtcccggctgcggtggtggagaggggaatcaatcctgcaaaattgcaaaatgtagtttagagcacaatggtgtggaatattgtttccagtgcagtaagtacccttgtgagaagtacagtcatatagatgattttgattcatttattacacaccgtaatcgaagagctgatttgaaaaaagcaaaagagataggaatagaagcttacaatgcggagcagctagaaaagataaaaatactggacattcttctgtctggttttaatgacggacgcaaaaagacactgttttgtacagcagtaactcttttggacctgcaagagctgcgggaggtactcaggcaaattgagaacagatccgatttggaaacgctgatgctcaaagaaaaaagtgcttttgctgcagaattgctgaaggcggcggcagcaaagaacaatattgagttgaagttgcgaaagaaaaagtgagggcttcaatactgcaatcatttaataaagcattgaaaaggatagagaatatagataaatgaaagtaataaacgtccctttgcagaaaaataagtgatgttttgcaaagggaatcagatattaattatggaggtatgcttgtaaatggataaatggttcacgattgaccagattgatgaaggtacatatattatcagcgaataccggcattgggaagagacgcattgctatctgttaaatggctccagctacagcttattgattgatacgggtctgggaatctgcaatatttatgatgaagtaatgaagctgacaaataagcctgtcacagccgttgccacccatattcattgggatcatattggtggccataagtattttccagacttttatgcccatgcggaagaattgggctggctgaacggtgagtttccgctgacaatagaaacaatcagagagatggtggcagaccgctgtgatttaccagacggttacgatacaggcacttatatgtttttccaggggacgccaacaaaggtactggaggatggagagaacattgaattaggtggacggaatatacaggtattgcataccccgggccatgctccggggcacatgtgtttctgggaatcagacagaggctatctgtttaccggagatctggtttataaggacactttatttgcctattatccgtcaacagatccggacgcataccttgcttctcttgaaaagatttcggagcttccggtcaaaaaggtttttcctgcgcatcatagtttggatattcagccggagattttaagcagaatgagaaatgcgttcaggcagcttcgggaagatggtaaattacatcacggcagcggcacatttgactatggggattgggcagtatggttataaagggaaggaataagaatatgaaatatcgtgaattgataaattacctaaaagaagaaccgcccgtttatcatgaaagctctaaagcgttttgggatgatgggcatatttctaaaagtatgttagaagctcatttgaacacggaaaacgatggagcatcaagaaggcttagtacgattcagaattccgttgaatggattgtaagttgctgtaaaagcggtcagggcaaacagcttttagatttaggatgtgggcctggtatttattccgaattgttatatgataagggattttcagttacaggaattgatttctccaaacgttccatagaatatgcccaaaatcatgcgagagaaacaaatcgtaaaatctggtattcctatcagaactacctggaaatggattatgaaaacgaatttgatgttattatcctgatttattgtgactttggcgtacttcctccgcaagaccgaagtgctttgctgaaaaaaattcggaaagcattgaagaaagacggaattctgatattagatgcatttaacaggccatacctggattcatttcagttaatacaaagcatccggtacgaaaacagcgggttttggtctgcggagccttatgtaatcattcaaagaaataagtattttgaagagaccgctaatacattagagcagtatttgatattatcagatgatgattgtgaatgtttcaatatatggaatcaaatttattccaaagaaacattcattggggaaattagaaacggcggattttcagaaattggtgtttttgatgatgtgacaggggcagattttacaggaaaatcggaaacgatctgcggcatttttaaagcagtataatttcatttagttgtatgctatacaaaaggttttatcagaaataaagaacagctaaggattgaggagcatttatatgtagtatgtacggttatatcggtagcggacatcagtgccgcaagaaaattttatgaggatctattcgggttagaagtctatcaggattacggaaggaacatcgcttttacctgtggtctggcattacagcaggattttgactggctggtaaatataccgaaagaaaaagtactgaaaaaatccaacaatgcagaagtcgtctttgaggaacaggattttgacggttttctgaataagctgaaagagtgcccggagattgaatatctgggaaaagtcatcgagcatagctggggacagcgtgtgattcgattctacgatctggacgggcatctcatagaggttggcgaggatatgaaaatggtgataaagcgtttccttgcttctggtatgaccatggaagaagtgtccgtaaaaatggatgcttctgttgaagatttaacgaaactgctgaatagttaaataagaatttgatggaggacatgatttgattacgataagaaatgcagaaccaacagattatgaaatggtgaaaatgctcgaagactctatattcttaattcaccagcaagccagaccggattattttaactcacaggcgtggtatacaaaagaagagtttgaggaactgttgatgctccccaccccaatttcgctcgtagctgtctgtgatgagcaaattgtgggaatttgctttggaaaaattgaacaaacttcagggaattccttttgtaaagggagaaaaatcgctgttattgaggatttgtttaccctgccgaaataccgaggaagaggtattgcttcaagcctgattaaaaaggctcgcgaacaggcagtcgccgagaacgcagagactctggaactctgcgtttgggattttaacaccgacgcattacatctgtatgagaaacttggcatgcaggtgcaatactatcgaatggaagaatgcttgaatgatagaacgaatacgccagaacatcctgttaagtagggatttcataaggatactttttagatttaggatagcggtatagcaattcggtgttataccgctttttccatatatacattgacctttggacggtcaaatattccgatatggttatagataatctcgatttcctgtattcttttaccactgctttctgttcatggacgataatacggtctatgaactcatgtacaatctctgatgtcagttcgggtatctctgtatacttcttgacggtagacaagaacgaatcattgcatatttcgggattagttatgaaaatgtaatagaatttgatataacacactattttatttcgccttataatagaaatcttcattaaatctttagaagtcctgtgtactataatttttgcaaataaaaggaagaagttagatattatggatttcattttgaaaacaactgatctctgcaaaacattttaaaagacagcaggcagtaaacaaggcatgggatgctatacagcaaggaaacacaaaaattggaaagtacaactatatcgttattccaagagacacggagtattgtgttttacgatatacgctttcttcccaatataaatcttcatttttacaaaaacttctcattccgcctgaacttttcatttttgtatctgcaattttcggaatgttcttaataatcacaatcattgctattcgctttggaaaaacactgaataaaaagctatctacgctgatttttgtttcaaacaaggtcgaacaacaggaattagattttgagatttcaacaagcggtattaaagaagtcgatgcgatacttcactcaatggacaatatgcgcaccgcattaaaagatgctctggaacgacaatggaaaactgagcaggaaaagaaccgtcaaatatctgcgttactgttagaatgctcatgtacggtaaagaagcaagaaaacgaaaactagaaatagaccgccagcactacactattccgaacctaagaccaaaagacaaacattgtggaaaaatcaaaaagttttgattatccaatgccgactacggcggaatcacaccccttatatctttacaactattgttattcattatcatcatgtggtaaattttcttttccccattgtttcatttgatgtagaatcggaacgaaacttttgcctaaatcagttaatgaatactctacttttggaggaatttcttgataaatgtaccttgatataaagccgtctgtttctaattcccttagttgtttggttagggtggattgtgtaatatttccgatttgacgctgtaactctccaaaacgccatgtttttaaagaaatgtaatataagatttcaattttccatttgccccccaaaatgctttgtattttggctattgttgcacatcgttcatattcgattaaattgtttttcatatactttgctcctttttgtgtagattgctttttgatactaagtattttttagggtactataaacaaaacaggacagtactttttaactttattgtaccatgatattatatgtctcgcaagaatcaaagcgacaatgaataaaaggagagtaagaatatgtcacccaaaatgaaaaaagtaaaagtagacgtttttgaaaagggtatgttttctaaacatgatttgagaagaatcattattccactgataattgagcaggcacttatgttgtctgttggaatgtttgatactttaatggtatcttttgcaggagaaagtgctgtttcgggagtatcactggttgatacaatcaacacattgcttatttatctgctaacagcccttgccacaggtggagctatcgttgcagggcaatatttaggcagtaaaaattccgaaaaaagtaagttggctggcaaacagttattgattgcaagtttgggattttctttaattttcatggtggtttgcttgctttttaacaagagttttttaaccctgttttttgggaaagtagagccggatgttatgaataatgcaagtatctatttttatgtaacagcggtttcttttccctttattgctatttatagttcagccgctgcgttatttcggtcaatggggaataccaaaattgcaatgataaattcctttgtgatgaacgtaattaacattttgggaaatgctttatttatttacggattgcatttagacgcatttggtgtagcattgtccactcttgtatcaagaattgtggcagcagttacaatcactatcatgctccgcaataaaactttgcctatttcagtgcgctcatatgatttttggaatattgaatttggagtaattagaagcattttaaaaatcagtattcccgcaagtttggaaaacagtgtttttcagattggaagaattattcttacgagcctagttgccgtatttggaacaagtgccattacagcaaacgccgtcacaggaagccttatcaatgtagccaccattccgggacaggctttaggactagccattaccacagtagttgcccaatgtatcggtgctaaagaattggaacaggcagttttgtatacaaagcatttagtgaaaaaagcatgggtttatatgattgctctgaacacgggaactttgcttttattaagaccaattttgaatttatatcatatgtcagaaacaacattttcgctggctttcacaattatgatattgcatattgttgggtgggtaacagtttgggttatgtcattttcgctgcctaatgcattccgggcagcaggtgatgtaaaatacccaaccattatttcaatcgtatctatggctgtttttcgtataggaagcgcatatttgttagcttatgttttccatatgggcgtattgagtgttttttatgctatgcttatggactggacttttcggtgcatttgtttctctgtacactggaaaagtgggaaatggaaacagtataccgctatttgaatatgactgtattatttgatttggactgattggagattagtatatttctactgtttccttctcagcataaatgcaactgtaaaacatacaccgccccatgtgggagaaagggggatttttctatggcttgcacagaagcatacaaagaacacattatgtatactttcaacggtttctggaaagttgtcatacgctatgccgctatcaacgcatggcgggaacggagcagacggcagcaaaatgaggcagccctggaagaaagaagattatgatttaaatgcattactttttgtaaagggagaaaaatcgctgttattgaagatttgtttaccctgccgaaatactgaggaagaggtattgcttcaagcctgattaaaaaggctcgcgaacaggcgcaaaagcgactatggagatggtaaataaaggcgcaatattaaatccttgtccacttttttattttgtttgactcgataatttttacagaaaatacgggcgtttccggggatatgggatcagtatgcaatttttagcagaaagtgatatcctggtatctgctgttatgatatactgaaaataataaaaaatcggaggttgtgaaaatgggaatttggatgaagagacactaacagcaaggcttagtgtttgacagccttgctaatctggtacaaacaacaggtattgattaggaggtaaggaatgtcatattttaattatcagtcaaagaatatttactatacggaaacaggaaatggaaagccagttgtatttttacatggaaatactgcatcgtctaaaatgttcgaacctcttctgcctttgtatgaagagcattacaaggtgatccttttagatttcctggggcatggaagatcagatcggctggttgaatttccggcagatctgtggcaggaggaggcaagacaaaccattgctttactggagcatttgaattgtggaaaagtaagtctcgtaggaagcagtggcggcgcatgggctgcgataaatgcaggcttgctgcgtccggacttggtggaaaaagtagtagcagacagttttgatggacggactctgggagaggattttgcacggaatcttataaatgagcgtacaggtgcgaagctggatgcacaggcagtatggttttatcagtggtgccagggagaagactgggagcggatcgtggatatggacacaaaggcgcttgttcaatgtgcagaagaaaaaatgcccttatttttaaagccgctgtcagaattaaagattccacttttgcttataggcagcgtggaagatgaaatgataaggccggattttcaagtagaatatgaagccatagccggagaaacaggagcagagacttgtatgttttcacaaggcgatcacccggcaattctttcgaatgcagagcaggcggcagaaacaatacggagatttttatattaggcagagataataaaaatcggaatatgacaggcgggtgtcatatttacgatgatacgattaaacatgggaaaagctgtgttatgaaacaggtagagggcatgggcaatctgagaaataacgcccatgcctttgcgcccggattatcatttccatagctctccatgaggttgataacgccccagataccaagtccggctccaagagcaataacgagtgtctgcaaaacgcctactgccgaattaaaaaatgccatataagtagtttccaaaatcgcagatttgtatttttttgttcatttccattttttcagacaaaacccaaaagaaaaagagccagaattttgttcaatttcttggctctttctactgcgatttcggatctcctttccttaaattttttcataagagatcttttgggtttcgcattcattattcagttgtccgtcccctcaatatgtgggagagcgaatccttaccatacttctccttcctccataggacagaccgcctcctgttcagaagacggccttccctggttcacaataattcgtttatcagctgataaaatgtgttgttcccggcatcaaaccatgacagatcggacagcctgcgcctttttgcctggcattaatcgatgcccgccaatgatgcccctgtcggcatatccaccatgctttcctgttactgtatggaaacacatcctccggccccagcccgtggtttctttcataatcccaactgcctgctatccacggtgttcgggttttcagatcattgtatcctgcaaggacttttgatcctgcacaatacggacatcccctcccgctatgcctttccgcaaaagacagcttgtaatcatgcccttcggggcatgtccaccaggccaccttgcgtgagccgtatgtataatctgcggggtttcttgccccgtttttggatttattccattcaggcacgagttccgggtgaaagtgtgcaaaatcattgaatccttccagaactcttacgttgctgcaatatggacaccctgtattttttcctgccctggcgcttaccatgcttttaaagctgtgcccaagccggcatatccaccagactgaacggttgctcccggctgataccatatctggcttcaaggggaaatttttacggatatcccattcttgtatgagatccggcctttttgtctccaggtcattaaatcccttcaaaacagattttccggagcagtaagggcagccattcccatgtactctgttggctgttgtcgctttccatgaatgcccgagaccatccttccaccatacttttttttgatagctgcacacgatctcatccggcctgattccgggattccgctcccagtcccactgcggcatcagctctggatgctgcgactggaaatcattaaaacctttcaggacttttttcccggcacaataaatacatccgcagcctcttgatctgcttccaggagacgaatgataactatgcccttttgggcatatccaccagtatggtttccgtgcagtccttgctatcatttcagggcgtgccgcaccattttttacataatcccattcggaagcaagcttcggcgctgaagataaaagatcatttacacccggcagcactgtatttcctgcacaatatgggcatcccgttcctgcattccggctatatacagatgcctgccagctatgtccttcgctgcatctccaccagcatttccgttctgttcccagccctacctcttctggccgtattgttttgtttttttcataatcccattcttttaggaacccgacatctaacgtgacgatatcattaaatccggaaaggatacggttacctgcgcaatacgggcatccctgcccctggaaacggtggctgacagttgttttccaggaatgtccatgcggacacttccaccatacctttgcctgtgaatatacagtcacatccgatggcttcaatacatgattcttttcatcgtcccattcttccgcaagttcgggaaacctggaagccaggtcatttatcccctgctttagcgccgctttcctggattcacatattttgcatccatgccctgcagtcctatggtatacggcagttttccattcatgcccgttttcgcatccccaccagattttcttcccagatccgggaagcagcctgtccggcctatcctcctggttcttttgccagtcccactgcgccgctatttcaggatagagcgtggcaaggtcatttactccacttatcagtttatttcccatgtctgtcaacctggctttccagcgcattctgaagctgttctttccaatccggtttttcttcggcagccgcctgtatgccctcaaaagcagaaggaaatctgccatcaatcaatgctcccatagtttccggcctgacagagatattttcaggaactggcatatgcttttcacgcaaaagctcatttgccaggtttggatacagataagtgcggagcatctttttgaggtaggaattctctttctccagtttcctgctctttgccgctgtctctgctgaagcctcctgttcctgtgaaagcgcctgttccagttcccggatccttttctcataaaccgacttctgggccataaactgcttatcccgatccagcagggatgacgcatggtcacaggtctttttccaataggcatccatttcctgcagggcagcaacgatatcttcaaccgtcttacaccttttaagaaatccttcgatatccagcgtcttataggctgtattggcctgctgttccaatgccagctcatgctcctgtcccagttcccggatcctctgcctcactttttcatcacgcttgaaatcataagcttttatttccaggccttttcctgcggcgaatgcctccagcctgctgaacttcagcctggaagggtccccgcagccatcgctctcataatatgcttccagaaccgcaaccatttcttccgaacttgttttctttggacgtcccatctatttcccctccctgtatttcctcgcaagaagccttccgtaacggtcagcactcccacggattcgcagaagcgcttcatcaatatcttcttcgtacccaagacttttccggagcagctcaatcatctgcatcagatagattccatcatcatctactgctttttttgcttccttttcgatttttatctgaagccctttcctgtcagcgtaaaaatgcctgcatgtaaggcagtccccgatttttccgccgggcacataagcccttacacactctgatacatctccctgggcggtatctgtatgatcacaccatccatttctgacccgcacccggttctctggcaggcaaaggtaataactgtttttcccggaaatcccggaagaagggtcccatcccctgaaacgtgccagtatcatgctttccacaacaccggacatgttcgaataataatgggagctgatgtcaatatcttcatggcccgcaagttcccggcagaccacaggggagcctccggacaggatcaggttcaccattgccagatgtctggtatccccaagatggatcggataagattcatccccaagtacttcccggcagaattttttcagccgtctctgcatctgacagtacgtgaaatacccagaaggtgcttctccctcgggtaccaggagtgtccctatcccaggtgtatttttatccccggccgcacttttgtaccagctaatctccatgaatatgctttgcgggataatgtaggaacagagttcataatcatcactcaccttatagcagtgcctgcccccttttttcagccttgtccggcggatagtaaggatatgcttcccgtcactttcagcaatacagtcccagggagtcatcagaaactccgtagcccgaagcggcagtattgccgtaagattccaccagaaataaaccggaaaatagaactgcttccgggcatcgtccgcctgtatccagtattcctgcagcgaccggccaaaagacagataatatctgaattctggaagttttctcgcctcccttctcctgatacgcgccctggaatcctccaattcctctatcacatggtccctgatgtcgttcccaagagggatcatggacagaaatgctgccctgtggtacgggtttgctttttggcactgcattgcttcttccgcagtgttccctgccattcctgcaatatcttttaccgtaatcctaatattttccagcgtcatttcaccaagcagcatcgaagcatatgccttcacgcattctttataacagtcagacgtgcatccaatccactgcagggaatttttatcataggcctccctgtcaatgtggaagtcgatcttatatttccgcagttcatttgttacaagccagatatcatcacggaacccgctttccttgataacgccgtttctcctgaattccataaatctctctatggcaagtttttttgtttcaccatcaagctttgtgaccggcagataccttacatatccaccgcataactgtgcatcagcaagcattcgcatctttcatccccctttcaatgatcctcctcaggatatccatgtctgcttccggatataaaaccgaaatgctctgcaatatctgcacgatcccggggatgatgtactttttcaggatatcctgtgcccgttttccatcatcgggatcatccagctgtctgttcagcctgacgtattctcttgccatcatctgcaaggcggttttcgtatagatctcatatccacagccaaggcagctggtgccgccaggccttatacagtcaaggccggccgcatttctcaggcacaggcattcttcctgcctggaggcagcgttgccggatgcgatgcgctttaatgtatcgtccagacattttttcccgcctgcttcttccagggtgctttttacaatagtaccggcatggctgtaagatgcggccacagttccggccacagcctcaatctgccacgcctccataccaagggctttaaccatttccgtctgttcagaaatgccaagcgcacggtattcttttccctggtacatctccaggagcatatatgggataaacccaaaaacacccctctcaaacatctcgcggataacaaaaccggcatcctcgccagtaaactttgcatccctcagataaatatccgtcatttctgccagcttcccgatgcctcccttatggcttcttgccagtgaagcgagcatatatccttttggtttccccggggtatctgatcctgttgcctcgattccctgcacataagatttattagccctgcgtgatttgaatttctggtatcctgccgcccgtgcaaaatcatccccaaagaaacggatcagatcctgaagcgtgaaatctatagaaacaaaaggatcctccggcttcctgaatgacagggagatcgccatgataaaccccaacggttccatgaggctttccgggatgaacagttttatctcaggggcaatcccctttttcagtgtcttatgtggccttttcccacgcatacggcagcggtattgaagctcaaaagcgatatcgtatgcatctgatgccggaaatgtcccctccctggccatcatccttattgtttcaggatcataggggagtgccgggactggaagcctgagtatatcagtcgccctcaaagcacagataaagtgaaacgccgaaaatgtccatagttgtgcatacctcctgctgtccaacgctttttcaatgagtccgtgatctgcccaggattccctgttcaatacggtgtatgccatcagggcaaagtcccggatgctgtatgccgtattatccgcttttataatctgatgacttttaaatctatacttccagcctgtatatggagaaccgctgccattataagtgaggtaagcggaaagcagggaaagctccttcattttcagttcagcgtatgcgtttgaaacgagatcattgatctcatcctctgagtactcatccagttctttattaagcgcaaaaatcagaaaatccattaccttccaggccgaacgggtatctttgtgtcctgaatccacaacatactcccgaaatctgcttcctgtccttggaaacttttctgccagaagcgctgtgagtatttctgctttttcgctgtctgccttccggtatgccttcagccacatattcagcgccgcctgcatttcatttgaaaacatggccaggaagtcaccatcttcctcaagatgcggcaccccaaaccattcattggcatccataaacgccagaagctcatccctatccttaatcctgtcgctgtagcgggagccatccctgcctgccatgctttttacagtaccgaacaaaggctgcatctcatttttccccataaatgtcacctccgatctccatcaatacagacaccagctgtacgtttgcttcttccagctcatgaactaattcccctttattctgaaggtactggaatgctgtctccgggcttttatctccacggaaagactgtatggttccgatatcctctccccggagaaccatctgcaccgtaaaccaatgccgcaaggaatgtgtcccaagattattctcataaagcatctgtccgtatatctttagctccgggtcactgcttttgaccagttccgggcggaggcggccattgaccagcgccttaaacttctgccggtaactttcataagacatcgccatcccattgctgtttacaaacatgggggcgtattccttctcaaatcttacatttttcagatactgctgatgaagccggtatgccatgtacaccgtccctacaaacggcggatagacctcctgcatacgtgcctttttgatcaggccgatctctgccccgtcactccgaagtaccagctccttcctaagatctatcctgattccctgtacttgtcctccaatctccgtaaagataaggccggggccatatgggctgcattcctgccttacattcatagcttcacctgccctcagacccgcaaaagcctggagacacatggcaaacgccacatctggtgtatatctgaacgccatcggaatcagaatctcaagcacctttgtcggcatatcccggaaaactccatcctcatcaacgattcccgtagcctggaagtcaggtaccttccgtttggcctgagtcccctttctggtaaaaaccatacgctcgacatacagttcgttacgcttgattttcatgtaccctccatacttccatgccatcttgtacataaagagggttacacaggagatgcaccgttccacacgttcagcgccacggtgaccgccatccgggaacttctccattgcataagcatcaaagaactcctcaagcatcggcttggtaatgtcgaagacatgccttatcccattctcagccccatgatctacaagaacgtagttgagcatggctacaatgaagtacagctttccttcagtattggccgttaaaggcttatacgtgtggttctcatacaccccggcgaattcctgtagccgtgtgaatctggtaatcacaccatatccatttttaattacaatgaaggccctggtatacaacaggccgtcctcagttttgttccggattgaatagaccgcatatctctgcatcttttccggagggttcatttcaattgtttcacccataattcattctcctttctggtccgatctgaatccagttaagagtatggatgaacaaaactcacaagtcatcccctgaacaaaactaattctgtctatttctgttttgttcagcttttaaatcagtgaacaaaacccggcaaagccagtaaaatcaagggaaagccacatgtgggggattctgtcccgaattttttggaaaaaagttctccttttctgccgcgtctgcggctgccccgaaaaagggcataaaaaacggcggtcagttttgataactgccgcggtcgtaagcccgccggatttgcaacgggttccccgcgccgtctaaatttctgcggcgcagcggtattcagttgtaagggtgtgcgacttctgccacgttccaagtaggagcgcggatcatgtagcctgtgtttactgatttgatgaaattagcacctccttttaaggatttatgtcttttggtgcaacgattttgtggcataaaaaaacggcgttcctatttccctatgaggggattagtaaacgccgtctatatggtgtattatttacttgcttctatgatagtaggggcggcagcactttaggctgtcgctccttgaccccctaagtgcaaaacagggcggggctgtcaacggtgatcccgttgatcttgaccgttgactggctcgactgggtttgctatcgtacatttgaaatgcaattttttgacttatctaccgtgaaatttctctggtaagaaatcgcactgactatcaggaatacctaaactttttgcatagttaatcatttcattccattctttcttttcttcagcagaagatgtatcaatcaatttcccgtgcataggtgatatgcctctgggagataatttaaatattttagaacggaagataacaattactttattttcattgtgaaaagtgatataccattctttttttagccgtgtactcatatttgattgaaaatacttgactgcttcctcaattttttcgcttgggattagtagagtatatatttttaccaatccccaaaagcgtttttttgaagcaatgattttatagttattaagcacattaacatttttaaggcttagattcactacttctgcatgataaaatgacattattttctcctcccaatataaggctccttattcattccaattcatctcattatcagatattccttgctttctgcactcgttacaaacaatggctttttcttcttcattaccaattgtgtatttcaatatcttgtttttgaacacgacaaattttgtgttattgcatttgaaatcaacaaaccaatttccacctcgacatgaatctgctattaaagattttgaagccaactccggaaagttaggtacatctgatgtaaaggaaataactgtccagtacttgggcactccgcctgtattccataattcaattttgtggacacgaacataatctaatagcttttcatcttcaaggctttctttgattagcgcaccctcaaacagttttgcatgctcttttttaatggcattattaccacaagtgttaatttcctttattccgttaatagaaagctcgtcctttaacaacacatcaaccgttacttgaaataaattgcttaatataatcaatttttctgtttctggaagtgcaatatcagcttcccactttgagatagactgtcggctaacattacaaataacggctaaatcttcctgcgaatatccattatcttttctcagtatttgtatcttttcagacaatttcatgtagatacctcctagtctgtttagataaattatagcaaatctctaaagctaatactatcaactttctcgttctttttagcaactaaaacgtgcgttctaatttaatcataagagggtctaattccccgatgcttgcattgtaacttgcttatcataaagtagaaaatgtgatataatgagagcggaaaggagcgttgttgtcacaaatcgcacaacgtatcgaagcttatgtatcattttgtattcctaacaaaatatcgaagagtagtagtaaatgaagaagtagacgaagtaataaaagaaacgtgtgaagaaataagcaagcgttatgatctttctggtcggcagggtattatgtggcaacagtgagtgaacatggaaatgaagaagtaacagcaaattatgtaaagaactaggggaatgagtataagaagctatttcgaaatacaggaatagaaagacaagtaagcctgtttgacgatatgtagagcaaggaacagggaaactttcataccccgcttttgtacttgcgaaagcaagtgcaaaaggcaagtactgtgagcggcgacgtaggggccgagcgcagtacttgagtgcttgcaccggggtagttgattgtatagatattggaatagtagggtgctgtcaatcaaatttttgtattattttatcgcacatgagcattttctgtaggattataattctgtttgggaggtctttgatggataaaaaagaaactgtgaaatatttttatgaagttgtggtgacaaatcatctgttagaagaagtcgggcgatatgtgtctgaggactgcgtgattaaaaatggagaagaattgattcatatagggcttgaaggaatgagggaccatcttattgctgtaaaaaatacatatcctgattattctatgaagattatcaggcagtattgcgagggcgattatgttatttccgaatttatcatggagggaacacataaaggagaatggctgggaataaatcctacgggtaaacggttgacatttaccggggtggacatagataaagtgcttgatggaaagattgtggagcatggcggtgcagtaaatacatttgaaactttgtttgaagcgggtatgataggagcgatataatttaaatatttaagaactgtaaaaaccgcgatttaggaggtgctatatggttattcgacagattgacaattcccaaattaatgcggcgattgctctaatttgggagacattcttacaatttgaagctcctgactattctgaagaggggattcaatcatttcgagattttattgaaaacaaagaaatgattaagagcttagatttttttggggcatacgaaaatgatgaattgaaaggtgttatagctacaagggaaaattgtaaacatatttgttgtttctttgttaaggcccagtatcatcgacaaggtatcggtagaatgctgtgggagtatcttttaaacaatagtgagaatttgctgttcacggttaattcttctccatatgctgtaccaatttatcataaatttggttttgtagatacaaatagtgagcaactagctgacggtataagatttacaccaatgcaatttaaaagatgagtttgcaaaatattgagggggaattacttccagaaataggttatcatattcataaaaagaataaatttgtgaaagcgggtggtgacaagaaatggttcgcgaagtgaaaaaagaagaattagcggaagtgctgaatttatatctatatctgcatgaaaagtctgtcccagaacaatcggaagatttgacggccacatggaatcaaattatagcagataaaaatcatcatcttattgtgaatgttattgacggaaagatcgtttcctcgtgtgtttgtgtaattattccaaatttgaccagaaatgtgcgtccgtatgcgtttgtggaaaatgttgtcactcatgcagaccatagagggcatggatacgccactgaatgtttagattttgcaaagtccatagcagaaaagaataattgttataaaatcatgctgcttacaggatcaaaggagcaaaaaacattggatttttataaaaatgcgggatataattgcacagacaagactgcatttattcaatggttagatacatagggaagagtctatcctataggatattgtacacaattcgctaaatgcaaggatgtgaatattttttgacggagataagcatgaaaacggtaatatttgatatggatggcctgatgtttgacacagaaagcgtatttatcaaagcatgggattatgcaggcgaaaaaacaggcattggaaaagccggctatatggttatgaagacattgggaatgagcattgcaatgtcaagaggcatatgggtatctgagtttggtgagaagtataacgagcaagaactccgtaaacatacaaaagattttttgacagagtattatgaaacgaataaagttccggtgaaaaaggggttatatgttctgttagagtatcttaaggataagagttacaaattagctgtagcatcttcatctccaagatgggaagtggaaaatcatttgaaagatgcaggggtgcttgaatattttgatgtgcttgtatccggtgatatggtaaataaatccaaaccagagccggaaatttatttaaaagcctgtgaattattagaagaggagccagaaaagtgttttgcattggaggattctaaaaacgggttgttatcagcttatagagccggatgtaagcccattatggttcccgatttatgggagccggataaagaaactgagaaaataatatatgggaaatttgtagatttagaaagtgttaaaagctattttgagaaattgcagcgcacttgctgcgccagttatggtatacctgataaggtatagatatttattgtatcagttatttcaaaagataaaatgaagatatgttgataggagatactaagagcagggggattacagctatttcgaatcctaataaaaatgatgattgacattgggatagttataagctaatatagaagcatatttcaagaaagagcaggtatgtggatgttaattgtttctgtaatgacaaagaacaactaaattttataagagggtaagcactgaatgtagtgtcttatttgtgttacccttttcagcattgttgaatgctggttgtttctgccttacagaatactgcatacaccgaaaataattgtcttattatgatgaataagaaagcggggaaagtatgactgtggtggtcatgcttttttttattcccgcgagcaacgagccaagtagccatgcttgtatggatatttggcgactgccgcgagggtcaaataccccgcagttctgcagcgaggtatttgacttctgcgaataaatgggctgtgtttttcagaacattgctgatttccttttaaggggaagttctgcttttttttatcatttgagagatatgaatcagtggtttcagtctatgtaggataggcggaaaccacgtttttttgtgcttttcattgtttgttgaacatatttaaaccggaggttttgaaaatgaagattattgagacagaaaatttaacaaaaaagtataagcggtacaaaaagcaggagggtctgaccggaagcattaagggcctgtttcacagagaatatgaacaaaaaatagcagtggatgcttttaacatggaggtgaatgagggtgagtttgtaggtctgatcggaccgaacggagcgggtaaaacaacactggtgaaaatgctgactggcatcattgcgccgactagcggcaggatacaggtcatgggattttacccgaataaattggagaaagcatttaagcagcagtatgcagtagttatggggcaaaagagccagttgttttttgaactgacggcggaggatacactgaagctgtttaaggaaatatatcgtatcccggaagacgagtataagagaaacaaagagttttttgtggatttgttccaggtacaggagcttatgaatgtacaggtaagaaccttatccctgggagaaaggatgaagatggaactgattgttgcactgcttcataatccgaaaatattgtttctggatgagccaaccattggattggacgctgtggcaggtaagcagatccggactttcttaaaagatgtgaatgaatcaagaggaacaacgattctgctgacttcgcattatatggaagatattaaggtgctgtgtaaacgttccatagtagtgaatcacggcagaaaaatatatgacggcgatacggatatgttatttgataattatcaaaagagtaagagaatgacgatatactttgcacacggcgtagaagctgatgtaccggaatactgcagggtattagaaaaagcgaatgacaaactggtgcttgaaataccaaaacagaacgcagaaaaggttctggagttttatattggtcattatccgattcgggatattggaattgaggaagaagaaataggctctgtcgtagagcgtatctataagggggtataggatatgaggaaatatatggaaattgccaaggcatatatgaaagcacagttaatctggaggtcggatacctttgttgacgtgattctggcggtggcaaagatactgtttgcatggatcttatggagtattctgtttgaaggaaaagaacagatagcaggacttggctttcaggccatgatttcatactacatgataagttcctatctatttcaacttgataaatcggctgagatcagccagcagatgaccggtatgctgagaaatggtaccttttcaaaatatatggtgatacccgtacagacacaggggtattttgtggcgatggaggccgggaaaatcgcattttcggcaggcattggtttattaacaacggttctgtggttttatttgttccggattccatttgtgcttactgccaattggaaggttctgtcatgtggtatcgctatggttgttttaggactgttgtttatggcggagctcaattacttccttgggattttgaccttaaaatttgaggagatcagcacctttctcatgataaaagacaacttctctgcatttgtgaccggggcggtgattccccttgcacttttaccggaatggatcatagaaggtatgagatttttgcctttctattatgtcacataccttccaagtatgctgtttatcgggaaatgcgaggaggaagcagtcacaggcttatttgttttaagtgtgtggtgtatggtctttcttgttttaaatcaagtaacgtatgaacattatcgaatcaaatatgatggagcaggaatatgaaaaataatatgaaatttatatcggaactaatcaaattaagattatcccatatcatgactttccggttgggattctttggcccgttttttatcaacaccagttattttctggttcagctttttgcttttgaagcgatttacggacatgtagaaaatatccgtggatggggacatggagaaatacttatttttattggaaccttttccctgattgattccataaacatggtaatctgcttttttggggtgatttccatacctgagaaaatacagaccggggaattggatttatatctgactaaaccagtgaatccactattgcggattacttttgaaaaagtgaatccaggcgccataccgcttctgatattcagtgcatgtatcattggatatggagtgagagaaagcggaatgagtctttcctatgtgaatgtcattggatattttgctatggttcttctgatgacgatactattttacgatatggagcttctgttgcggtgttttgctttttttgtgttctcggtaaacaatctgatgaaaatagagaacacagccatagatttgtgcatgaaaataccggggatcgctttttatggaatctataagctcattttttattgtatcttgccatatggagtgattgcaacgctgccaacgcaggtattgataggggcgttgtctgcaaaaggcttgatgttcggggtgataatcgtttgcatttttacttttattgcactatctttttggtcatatggagtacacagatatgaaagtgcgagcagttgataagttgttgggacaggcgggataagaatgttaattctaacgattcttgatgcttgtgtggcagttctgttttttgtacaataagattgaagatggaagtgtgaagtttgtatggaaggagaataagtaaatgaaaaatataacaacaagacaatttagtgtgttggcagattgcggaaaaatctatcagtttatgctggatatttatgagagggattggagaaacggtgtgccagctccattttttgagtatgcattctcatcatttgcatattggatggatataacatattcttataaaaatcgtatttgggaggaacatggtaagatcgttgcattttgcttttacgaagcgcccgtgacagatatttatttcagcttgaagcccggatacgaggaattggcttcggagatgatagcgtatgcagatgcgaatatgccgattaaagaggaaaaaatacaactaattctatttggcgggcaagaggcgctaaaaagagccgcggaacagttgggatactatcaaaaatcagaacattgggatatgcaatttgattttgatgatgtattggattatccgttgccggaaggttttcattttgtgaaaccggagaagtatgatatggacaagctgagtaagtgttgttggaaaggatttgatcatgaacaaaacgaagggccttggaatcatcaatacgagcagagtaattatttgttagagacagcgccgcatgcaacatcggaactggcagttacaattgctgatgataaagaagagtatgcttgttatgcagggatgtggtggactcctgaaaacaaactggcgtatatggaaccgctttgcacaattccggaatatcgtcacagaggacttgcttcggcagctctgtctgaattgtatcgaagaacgaagacattaggtgcaacacatatgacgggcggcgagaatgaattttataagaagattggctacaaaccggcagtaaaatggacatattggcagaaaagataataatgctttgcagccctgtaagaaatggtgctacggttgcaatagttaaggttgttatttcgtgtttaaagaaggataatgaaatagaagagttttgcaatcgaatgtgagggagcggatttatgaaagtcaaattttatgaaaatattgatgattctttgttaaaatttgcggtcattgtttcaaagtcagaggggaaatgggtattttgtaagcataaagaaagagacacatatgaaataccaggaggacacagggaggatggtgaagcaatagaagatacggcgaaaagagaactaaaagaagaaacaggagctattgattttcaaataaagcctgtatgtgtatattctgttacaggaaaaaacagagtaaatgaaactggtgaagaaacctatggaatgctttattatgcagatatcaaaacatttgaagatgacttgcatagcgagatggaaaaagtagtgttatttgatacattgcctattgagtggacatatccattgatacagccgttgctgattgatgaatatgagcggagaatgaattgctgattttcaattctgaaaggatagacgagagccagtgaaagaaatatatattattggtggcacgatgggtgtgggaaaaaccacaacttgccagatattaaaagaaaaactggataacagcgtttggctggatggagattggtgttgggacatgcatccttttcaggtaactgcggagacaaagcagatggtgatggaaaacatctgctttttgctgaatcagtttattcggtgcagcgtttatgaaaatattatcttctgctgggtgatgcatgagcaggaaatcatagatgaaatattatcgaaattggaaacaagtggatgtctgatacataatatttcgctgctgtgcagttcggaagaattaagaaaacggctgcagaaggatgtggatgccggtatccggacggaggatgtgataccgaaaagtattgcaaggattggcttttaccgggaactgaatacagaaaaaatagacgtttcccatatgacaccggaacaggcggcagagaagattatggaaattgcaggtagatattattacggagaattgtacaaatgaaaatagacagactgttgaaaattgttatttatctcttaaatcatgagaatgtttccgccagagatttggcggaacggttccaggtttctgtccgaaccatacagagagatatggtcagcattgcagaagcagggattcctgtatattctaaccagggaaagagcgggggatattccattttgccgtcatataaggttagaaactgtaatatccatcaggaagaacagcagttgatccagcaggcgctggaaagccttgcaacttcgtatgcaaatgaaacgctggcgggcttaattgaaaagtatcatctgcttgtggataggaatcaggggcagagtatcttttttgattttggaatcgcaagggagaatcaacaggtgcagaagttgattcaaatgctgaagcaggcaattgagacaaaggcactggttgaatttttttatcgggatgcacagggaaaggaatcgcagcggttggttgaacctcttgctatccagtataaatggtattcctggtatttatttgcatggtctgttccacaggaggcgtatcgtacctttaaagttgcacgaatccgcaagcctcaaattacatcgggaaagtctgacagaaagcatccggcggtaaaggagcttatggagcagtcagacagggcatatggtgaaacttgtattacactggaggtagcgtttgataagaaagatacgtgcttgatggaagagtactttccggacagccacatagaagaacagtcggaggaaaaatcaagaatatggattcaggttccgcctggagaacgctcatggaaagccctgcttttgagtatgggaaaccgtgtgaaagtcatttctccggaagactgccgaaatgagctgatcgagacagctcaaagttttttatctaattacgacatatagctgtcgcagaagcatggtatgatgtagtcgttgtatagaacacagaatattctgcgcttatggcggcagggaaaaagaaaggatcataagatgagtgaatttgtgaaagcgttgcttggaaatcagggaacttccccaaaaggcagaagctgtggggatgtgtatcaggattgcccggtttttgacaatggaaactattgtttccgcctggttgcagaagacgatgccggggatctgctgaaggtctattcggatgagaagtcggttccgttttttaacagtgacaattgcggtggggatgacttccattatacatcccttgagaagatgaaggaggcagtcagctactggctttgggagtatgaaagaagagggtttgtaagatggagcattttcagccataagcgtgaagaagtcataggaacggttgagttattccacagggattcagaggattatttcacagactgcgggctgctgcgtctggatttgcgaagtgattatgaaaaagcggatgtgataaaagaaattttacagcagataggcaccccggcgtttgacatgttttcctgccggatgttggcaacaaaagcggtgccaggggcaaaagaacgtattcgggcactggcggcactgggatatgaagaatcggatcatgcgctgatcggacacgatggcagccagtacaaattttattgggttctcaataagaaataggaaacattatggagaaatatgttgctgcagtatgatgacgggttctgtcgttatcttattagagcgtgtttgaaaaatgctctagcagtgggagggcaaatggacagaatttattttacaaaaaaacaggcgcggcagtttttgttattaaagcatggcttgttgggggaatacaaatatgttggaaaagaaggaattctttcttttgtccggcaggcaggatgtattcagtttgatccggtggatgtctgcggcagaaatgcggatctggttttgcagtccagaataaaaggctatcaaaagacgatgctttatgagcttttatatgttgaccggaagctggtggattattttgataaaaatcttgcaattcttccggtagaaaactggaaatattttgggcgtgagcggcaggctcaccgaagctgggagagaagccatacagaaatactggaagtacaggaacgggtgctgacttgaaaaagtaaattccagtgcaagggtaaattccatcacttcttgttttttacagattttacaggacttttttaggcagaaccttttgttttctgctataattagctcaacttatcgaaaaatacttgatttctgggcatggtaaatggaccgctgagaagcagtgtgctagactgaattccaccggccacatttgaaaaatgtgaaaagtttacttccagtctgacagcagattcgattagttgtttagtggttaaagcggatcagcttaggcgtcagatttacctcatccggggcaatcggtctaagctgaaatgcatttaacacatcttcgcccatagtttcaagcgcaacgctgtatggggtcttgcctccaaggctttcccttggtgttgaattgatatggcttacgatcaggttgacatcccactgggtaaggaattcaaaactggttcctttggggagtatcatacgaagcatggtatgggcctgctccagccctcctttttggccgctccgcattgggtcacagtaataaatactggtgtgttgtatgccttttacacctgtttccagggcttccggatcaccgaactctgaaccacgatcggtcagcaaatattcaaagatggaagcaaattcataggttcccatacgtttttctaaccggtcaaatacgaggcggacagcgccttctgtacagcggttcatcaaaaatgcaagaaacagtttttcctttgtaaaaaagaaagtaagcagcgttttctttgattcctttgaggaatgtaccgtatccatttctgcaaagaaaggaagctgtagagcctgaaaatcgtggtaggttcgattggtaaagacggcacggtttgtgatctgcgttttatggcacttacgtggtttgaactttactttgcgcttcagatcaatgttccgtgcagtaaacagcccctgatcgagataggaataaacagtcctgacagaaagatccagttcaggatggttcgtgacgatctgatagggagattgcccctgttctatgaggggcgagataatcctgtcttttttgtgaagctcatgcctggtaagattgattccggctctggaatcagagagtttttcacggtatttacgattggaaaaccttgcgttataggtatacttatgggcgattgtgcaatgattcatctttttagggcatccgttgcagacataaggagccatatcgagacgggtgcattgctctttctcaaaatctttgcaggtctgattacacgtgggacaggaagcacacttaacgccgcagagaacgatcttgccacaggcattggtcttcttgcagtgataacggtggatacaaaagttcttagcattataaaaggtgcccttatggtaccagtcagacagccggtgagcttttacctcttttgagatagtggtagggtctttgcacaggaacttagcgatatccttaaaggatgtgcctttgttcaattgattttcaatgtaaatacgatcttcaagagtaagatgtttttggttacctgggatatatttactcatagttcctccttctactgctgtcagaaggagggataaccatagcataaatatatgaaagagtaaatatcaactgtgcgagggtgaattccaccgcataagcgagcggtggaattcaaaatttcatttttgttacaggaacgggtgcgtgaggaaatcgcacggcggggaccgctgtgcagtgctgatttggacataacgggaaaggtttcctggtattggagcgataccaggttgtcgagagcggcgttggaacatatgtattttgtgggagaactgggaatccatcataagagcgggacactgaaatattatgatttaattgaaaaatgcattccggcagagatcttgaatcaaccagagcctcatccttcggattttgattacagaaaatggctggtgttagaacgcattggctccgtagggcttttgtggaaccgtgcttctgatgcgtggctgggcatacgggagctgaaggcggcacagagaaatgctgttttcgagactctgctaaaagaagagaagattattgaagtgaaagtggaggagattgaggagccgttgtattgccgtggggaggatgcaggactcgcagaattagtattggaaaatcccacaattaaaaagcgctgcgaatttattgcaccgctggataacctgctctgggacaggaagcttattggtgcagtttttgatttttcttataaatgggaaatctatacgccgaagcagcagcgtaaatatggttactatgttttaccgattctctatggggacagatttgtgggcaggatcgaaatggcctatgataaaaagcaggcaaagctggatataaaaaatatctggtatgagccggacgtgcgcttgacaaaagcactgcagcgcgatgtggatagacgtatcagacggtttgaacgtttttgcagaaacggtgacatgtgaatcatgtgttcggagattggagatgcatcatccttctgggattaaaatgtatgaagacgtgcaaaagtgtaaggtatggctggtagagttttctttgatatgacggtatatttttcttatcgaaatgaatactctgcaactttgaaacccggagaaaagccagaggataactgaacataggatactggagagccaatcggataaactatttattactttttaataatttcagtaggatgattttaagatttatccggtattctgttcacagaaaatgattgaaagtaggaggattttgcaaatggatgttgtttcaagtagtcaatcaagtgtcgaaattcaaatcgggctgtttgacgctatcatagacttactgttgattaaacctatttttttgttgggagttgtcttaattggaatttcattgcttgtaatttttagaaaggacagcagtatttctaaacttaaaatagcgatctcatcattggtcatgtattattacttatgtttggtgctgtccaatatcgtaggcatccctacgcttagtgaatatgtaagactgtcagggttgggagaagcgttttttaatccaaatataaacctgattccattaagtgacggatttagtttgagttttattttgaatattttcctttttatcccgttaggctttctgtgtccgcttatgagcaaaacatttgagcgtgcgagaaatactttttttattggttttggattttccctgtttattgaaattgtacagctatttacattgtaccgggcaacagatatagatgatcttcttacaaatgtaatcggaacaatgacaggatatctttgctttagactgattgcaaagctgggaattgtaaaactacattcaaatgacagaaccgcggaacgggactatacagtatatattcctattgtcattatgatagttaccgttgtgttaggattttttagctgatttccagattgcctggtaaagagaatgagtgaaacaagtttctctggggagaaagatcagaaaacactggagattctgtcaaatcaatcatttaatgatggggtgctggagataaagaggccaataagaatttgaaggaggtgttaatatcaaacaaataaaaccttttcttcttccggttttatccttaatagtctttgaccaaattatcaaagtttttataggattattcttaatagactttgactttgatatacttggagaatttctaagatttagtcctgttcaaaatacaaatctttcgtatggtggaaatttcattagtattctatctaatttatgggttatggtattgtttaatattttagtgatttttattttcatatcgggatattctttttataaaacaaaaaagcaacatacgagttgttcagtaaaagtgattattacttgtgggctggctggggcaatatgtagtttgttagataaagtattatggggcggaagtttagattttttgcaaataccaagtttttttactttcgacttaaaggactgctatcttactatcgcagaaataatttttgttattataggaattttgcacagtaaggaaatatcagcgaaggagtatatagctttttgctttggtagattaagaagctaaatcccagttaataggggagcaacggtgttcattgagtattttgatgaagtattataaggtgtgggagcatctgttggcatgggaatagcggatgctttttttacgcagatctgatatgcttttagcaaacctactatattgggtttctacatacaaaatcataaatctacgatatactttgtaagcgggcacaggaacattttgaaaagctcatagaaagcatgaagcagtcacaggtcataacagaacagctaaaaggcagaaaacgccttagagtggacaggaaggcataataatatattggcatgtgcgagggagattgtaaataaggaaattatttacgcataagcgacaacagcggcaaggagaaatctttgccgcattttttgagtttttctatcgtgctattgtaacaaatttgacaagcataattcattgtgatataatcaccactagagtagtaactaataaaaactaaggagaaaggaaaatggaagaatatttatttgagaagttacagaaatttggattaaatctgtatgaagccagagcttatgcaagcctgttaaaaattggaacagctaatgcgtacaaggtaagtaaagaatctggcataccaagggcgaggatttatgatgttttggaaacactcacgaaacgtgggttagctatggtagaagaaagcagtgagaatactaaaatttatacacctgttcccagtaaggtttttttagagaaaacaaaaaaagaatgggaaaacgattttgaggatgttgcaaatgctttggtcgagttggaaacagaggcaaataagcaggatgtttatgttttcacagtaaaaggaaaagaaaatattacctcttattgcagacagttgttaaagggggcaagccagtatgtaatgatttccatgtggaatcaaatgtatgaactgcttttgcctgaactggaagaatgccagaaccgtggctgtaaggttttaggcgtggggcataatttaaaaagtcctgttgcacaaattgaaatacaccatgatggaaaatatcataatatgcctgaaaatctccgttggtttatcatttccgctgatggagaaaagctgctttatggatattcggcagaaacggataaagacgcattttatactgaggacacaagccatatttatcttttggaagattatatgattcatgatatggtagtcaaccgacttgtttcggataaggaaaatgaggaggaattaagctctatgatgagggaaatattaaaagaactgggaaaatagttttaggaaggctggtaatcttatggaaagtcagagtgaaaaatctgtaaagctaagtggaaaaatgattgcgcttatggcggcggcaagtgggatagcggttgccaatatctattacatacagccactgttaaacagtgcagcagagcattttaatgtagcaggctctcaggcaagcctgcttgcgactcttacacagaccggatatgctttggggttgttttttatcctgcccatagcagatttgatggaacgaaaaagattgattttaacaatgatttttttatcagtcctgtcacttctaggaatgtatttatcgccaaatttcatattagcctgtattgcctgtctggcagttggggttacgtctgtaattccacaactgctgcttccgctttgtgcaaaattgtcggatgaacgggtaagaggaaaaaatatcggacacatcatgagcgggcttttgacaggcgttgtcctttcaagggtagtcagcggtacagtcggtaagtatttcggatggaaaagcatttacataattgcagttgcttttatggcaatactgtttaccgttttgaaatttacacttcctgtttgtacagccgaggaaaaaggaaggctgaactacgcatcatctctaaaatcaatgttttccttgccgagtaagttccctgtaatcagagaggcggcggtaaatggggcaatgattttggcggcattcagtgcgctttggacagttttgacattccacttacagggttctccatttcattttggtacaaacatcatcggcctgtttggaattttgggagtaagcggagctttgtttgcaccctttgcagggaaaatttctgataaaaaaagcgcaaaatacacagtcggaatcaatattataataatttttatttcatatctttgttttatcgcttttggatttagggtctggggactgattgcaggcgttatactgcttgatatgggcgtgaactcctgcaatgttgcgaatcaggcaaggatacagagccttagtgaaagcgaacggaacagaatcacctcagtttacatggtaactatgtttgcagggggtgcagtcggttcctatttaggtgcggctttatataatcactttggatggtatgggttttgctgcatcggaatagtcacacagatgattgcaggagctgtccatttaatgggcggtaaaaagcggtaattttccgtttgcaatataaaaaaacataggaggtcattaaaatggcgaaaatttatcacgaagaagaatgcagcttgaaaccattagagggaaaaaaggttgcggttatcggctatggaagtcagggacatgcacatgccctgaatcttcatgaaagcggagtggatgtaattgttggactttatgaaggtagcaaatcatgggcaaaagccgaagcggcaggactgaaagttgttacagcaaagcaggcagcagaagaagcagatgttatcatgatgcttgtcaatgatgagaagcaggcagatttgtacaaaaagtcaatcgaaccgcatatgacagagggaaaatctctggtgtttgcacatggctttgttatccattatgggcttatcaagccgcctgcggatgttgatgtgtttttgatagccccgaaaggtccggggcataccgttaggagccagtttgaagagggcaaaggcgttccttgccttattgcaattcatcaggatgcaagcggaaaagcaagggaaacggcacttgcgtatgctcttggaatcggtggggcgagagcgggagttgttgaaacaacattcaaagaagaaacggaaacagaccttttcggtgagcaggcggtgctttgcggcggtgtttccgcccttatcaaggcaggttttgaaactcttgtagaggcaggatatcagccggaaatggcatattttgagtgctgtcacgaaatgaagctgattgtagaccttataaacaggggtggtcttaatatgatgcggtattccatcagcgatacggccgagtatggtgattacataacaggggaaaagattatcacggatgacaccagaaaatccatgaaaaccattctgaaggatgtgcaagagggaaagtttgcgaaggagtggctgcttgagaatcagtctggcagggtttatttcaatgctaaaaagcagatggaatcagagcatgaaattgaaaaagtcggggcagaactcaggggattaatgtcttggatgaaaaaagaaagcaattcatagtattatgtcagaatggatattatgccctgtctgcggcaataaaacccgtgacaggattagaaaagacactacattgaagaactatcccctatattgcccgaaatgcaggcaagaaacattgattgaagcaaaaaatttacagataaccgtcatcagagagccagacgcacagacgcagagccgatgaacttttgaaatacatcaaagtttgttggctctgtttcttttgtaaggctttaaggcaaacgttggtttgggaagatttttaatatccttttttcaggtagttgtttagtgtttccattaaagaacaggggcataaggtttaggaataggggcagaggcagcttgaaatagggctgttctgccttttatcttagttgagaatatttttatgttacggtataatgtggagggattattttagaaaatgcttatatggagagattacggagaattataaaatgcagggaaccaaatataatgagaagcaaagaattatgatattagaagatgacggggatttggcggaagggatcagtttgtcgttaaacagtgtagatttagaatttgttctgtgcaagacgattgcagaggcaaaagatatgctgcagcgtcaatcctttgacctgttaatttttgatatcaatctgccggatggaagcggactggagctttgcagagaaatccgggaatccagtcggataccgatagcattgctgacggcaaaagatatggagttggatattgtcaaggggttggaatgtggggcagatgattatataaccaaaccattcagccttatggtgcttcgtgcgagggtgcgggcattactccggcgaaattcaggagagcagaaatcagagtacagagataaggtattccagttttgttttgatacaatgaaattctataaggaaggaaattctattgaacttagcaagacagagcagaggatcttatatctattggtttttaattcagggcagattttgacaagggaacgtttactggagtgggtatggccggatggcacagaatatgtggaagataacgctttgtcggtaggaatccggcgtctaagggacaaattggaggatgtgccgtcaaaacctgctcacattaaaacagtttatggaaaagggtatatgtgggagaaagattgatggttggatgtatcatgttggcattgggcgtattcgttggatgtactgcggccggcctgttagtaaagagatattatcaaaacaggatggaagagacttatcaggagctgttacaaaaactggatcgggctattggaggagaaatccaggatactgcctataatgaatccatggacgcagcagttgtggagcgtttaaacagggttgttcagatagccggaatgaaccagggaaaagcagagcgggaaagggataccataaagtccttaatttcagatatttctcaccaggtaagaacgcctcttacaaacattatgctgtatgtggggcttttgaaggaacaggaattagatggagattccatgcttctggttgataagattcaaaagcagtctgacaaactggatttttttatgaaagaattgatcaaatcatcctatgcagaacaggaggtgatctccatccatccggaaatgaacaatgtggaagagatcgtaaacaccgcttgtcaaatggtagaactggcagcattaaaaaagaaaattgatattatacaggaagaagcagaagcactttgttatgctgataaaaaatggacgatagaagtccttggaaatattctggataatgcggtcaagtattctcctgaaaataccggggtaaaagtaaaagtcattccctatgaatcatttatctgtgttcaggtcgaggatcagggaatcggaatcagagaggaagaacaggggatggtttttgagcggttttaccgttccaaagaggtaagtaatgagccaggatttgggatagggctttatctggtaagggaagttttatcaaaacagggaggatatgtaaagataaaatcagaaccgggtaaaggctctgtggttcaagtgtatttatcacgttatgaagtatgaatatggttcaactgtttagcgcagccggagtacggctgcattttacattcatagaatatgtcaaaaatgtcaccttcacgacagatttgagaaagaatcctccgctattctatacaatgtaaaaaagtaagaaagcaggtgtagatatgaacatactggaaaccgaaaatttaaagaaatattatgacatgggtgaaattcaggtgaaggcgttggacgggattgacctttctgtgcaaaaaggagaatttcttgcaatcgtgggaacctccggcagcggaaaatccacgctcctgcatatgcttggaggattggattttcccacatccggaagggttattgtagatggcaaagatatttctaaaatgacaaaagatgaactgaccatattccgcagacgaaaaattggatttgtattccaaaattataatctgcttccgcttatgaatgtgtatgaaaatattgtactgccgattaaactggatggcattaagccggatcagaactatgtggaacagatccttgccatactgggattaaaagagaagaaatatgccatgccgaaccaattatccggcggacagcagcagcgggttgctttagcgagggcattagcaacaaaaccagccatcattttggccgacgaacctacaggcaaccttgacagccgtaccagccaggatgttttagggctgatgaaaaccacagggcagcgatttggacagaccattgtgatgattacgcataatgatgagattgcccagatggcgggccggatcatacgtcttgaggatggaaaaatctgtggaggtggcaatgattatgctgaaagtgaagaataagaaagtgattcgtgagatcgcagggactacttatagggcaaataaaaagaaaaatatgcttaccgtttttgcaattgttttgactacatttttaatttctattgttatggctattggagtaagctattggaatacgatttcagagcgccagatccgtatggaaggaatggattatgatattgaactgagtgagccaagagaggaccaggtagaaatgatccgttctatggataacgtggagtacgccggaatcgctgtgaaatgtgctgttttggaacagtataaggacaagtcactggataagaccaggatttactggctggatgcagcctgttgggaaaatcagacaattcctgccctggaaagctataaaggaaaatacccgcaagacgaaaatgaaattatgctctctacaggaactttgaaatctatgggtatccgggacccggagattggtatgaagctgccagttacttattttactttaaaagagggttcggatgaagaacttctggaaaaggaatttattctttgcggatggtatacggattatagtggaaatcagagaggatatatatcagaggatttttggaaaacaaccggtgttacgcagacggattttacacagggaaccttaaaaatcacactaaaaaatccattatattctgaaaaagatattactgaaatgcagaatgcgattggtctggaccggaatcagatcattgatgccgattatgatacgatttcaaatttctgtaagatcgtgatcggtcttacggtcatgctgctgatgatttttgccagtggatatctgtttatctataataccctgtatatttccatttcaaaagacatccggtattacgggcagctaaaaacagtgggaatgacatccgttcagttaaagagaatggtttatcagcaggcaatctggaatgcggtaatcggaataccgattggtttgattgcggcagtcttgactgcaaaaattataattccgcagctactgcatgttgtgaatcctgcattttccgccagtgatgttgtagcagtgaaaatatgggtatttctgattgcaggatgctttgcacttttcacgaatttgatcggctgcagaaagcctgcaaaaatggcaggagattgttcgcctgttgaagcgcttcgatataccataagtatgggtagcaggaaaagccgtaagcgggaaagcggcgggacgtattctatggcattgcagaatatgttcagggataagaaacaggctgtcattatttttacatcctttattattgccatatccatttttctggtgatcaatgtgatcattcgggaaaatgacgcaaagcttattttgaatgaggcatattcttttgatatgcaaatcaaaaatgagacaacactggaagatgacaggcagcagctcattacggaggataagatatctgaaatagaaaaaatagaaggtgttaaatcggttaggaaagtgacgtctgcggaggcggtagtcccttatcaggaagatgtttatggaacatattacaaagaattatatcagtccagatacagcccggggaattatgaggaagatatgaaattatatcagcaggaaccggataatactctctttaatacccgttttatcagtgtagatgaaaaaggatttgaaatcttaaatgagagtttcggaaaggttctgaataaagatgagtttgaaaacggaaaaatagccgtggcagtcaaatcttttacagaaggcgataatggaatgactggaaagacggtacgattttatctgccggatgggacgaaaccagatgaagaacatacgattcagattgcagccgttggtgatatttatagtaatccggcatatttttccggtgggtatacaccggagttaatcgtcagtgaaacatatgcagaagagcttataaaagagccgtttacggaactgattaatatagaatatgaagagccgttttcaaaagagacggagcaaaaagtaaaggctgtctttgaggataataagcaggtttcgtgcgaatcaaaactggagcggtactctgaaatgaaagattcagaaacccaggtaaaagtattgggaaacagtatcggatttattatcgcaatgctggcaatattgaattaccttaatatgatggccgccagtgtacagaaccgttccagggagtttgcgacgctggaaagtatcggaatgacaacaaaacagattaagaaaatgctgagagcagaaggcgctggttatgcggtgatctccattactgtttcgttaatggcgggacttccaatcagctatgctgttttcaatgggatgaatctctaccggctttcattttctgttccgtggatgagtaattttatcttatttgctatcgtattgattttatgtatgaccgcacctgtgcttatttatcaaaagactcaaaatttcagtattatcgaacgtcttcgtaatgctgaagagcaataatcctctgcccaaagggggaatcacctatggtaaatatcctggttattgagtctggcaaggaagagggggtgtcggcttttgacaaatttgcctggtaacatcctacccgtagtggtaaattgttctatataagcagattaactaccggaggaatgaacatggatgaccagcagaatttactggattacgagacaatcgtgaagtgttatgaggatgagcacttgaagcagtcaatagctttgaaactattggaggagatatccagttttctgttggaggaagcagagaagagggcaaaaggggaaacagaggcagatactatttgagagctgtcattaccttttatctcatttgaaaaaattacaaaggcacggtataatgtaaaaaactttcaggaaacacaaatatgaatggaggtatacgcttgattaagaaaaaggggattgggatattatttttttgtattggctttattttattggttggttgttcacagaaagaatcatatgttgattatgttgataatgataaaaaccaattattagaagttatggattctaagaataacataattagacagacaacagataatagggttattgccgaattggtttcaaatgaaaaaatagaagaatggattgaagttgagaaacttcctttgaatacggaaaaactatatgtattctatagctacgagcagataacagaatctatttttataaatgagacagattctaatatttccagtgggcaagaaacactatatagaagtgatgaagcctactatatagaagatgttgatgatgatggtgatattacctatgagaaaatacctgattctgttggaagttatttggttgaatttgcaagagaaaaatcggacatacgagacaaacaagatattttttctgaatgggaaaacacaacacaagaatctgatacagataaaactgccatgttaggtgaaaaaataatttcctatatacaagaaaaatctgataacaaacaagacaatacggaaatgacaaatgaccaaaaaatagaaattatatatttagatcataccattactataactgattcagataaaatagttgatttttacaaagaattagatatagaaaaatggaatgaaataaataaaccattatctgatgaaaataaaatatgtacaataaaattttatcagccagaaaggaaaacccgtagcaacagtttatcattgaataacgaaattattatttatcaggatgatgatgaatattgggtagattctactattccagcaaataactctgggaataatgaaatgaaaacgtattataaagtatcttctcaaattgttgaatatctaagtggcttgttttaatactaaaatcataagcggtgatggaaatgaaagaaataactttagagtagaactttgatgcaagaaggagatatatgaaattaagcgtattagtcgataataacacttatatagatcaatattactgtggagagccggcagttagttattatattgaaatgggcgataaatgtatattgtttgatacggggtattcagatgtttttctaagtaatgctgaaaaaatggggattgatttgaggggattaacacacattgttctttcgcatggacataatgaccattcgcgaggattgcagtttctgtttgcacgatttgaattgtcgcatgtaaaccttatagcacatccggattgctttttaccaaagtatgatgatattgaatatattggcgcgccatattcaaatgcagaagtagcgcataaggccaattatattccctgttgtgtaccatataaaatctccgaaaatctaatttggttaggggaaatcccacgaagaaacgattttgaaattgcacagcctattgggaaacagaaaaaatcaggccaattagaagctgattatgtaatggatgatactgcactaatataccgaaattcagacggcctttttattattacaggctgttcacatagcggtatttgtaacatcgttcaatatgcaaaagagatttttaatgaggaccgaattatcggaattttaggaggtttccatctgtttgataatgaccaacggctacagaagacgattcgatatttgaatgattgcaatataaaagagctttatccttgtcactgtgtgtcgctattggctaaagctgaaatgatgaaaaaactgccggttatagaagttggtgttggcatgacgatttcgttgaaataagtgttaaaagaaatcaattctacttttattttaccagatgaaatgataaaagaaagagcgtttacatgaaaggaatttttaaagatgaaaattcgagagaattatacatgcccgttagagttagtacatgacattataaagggaaaatggaaaacgattattattttccaacttagaaacggaatatgttctttttcggagttacatcatagcatcgccggaatcagtcagaaaatgcttttagaacaactacatgaactaaaggaatttggcttggtagacaaaaactcttatgatggtttccctttaaaggtcgaatactatttaacaatacgtggtgaaaaaatgctatctgctatcagaatcatgcaggaaatcggaattgaatatatggttgagcatgacatgacggatttcctggatcagaagggcatctgctattaaattctatcttatatacaaaaaagtaagtaatttacatgccgctgatttgtgtgtattatcttttcagaacctgacgaaaggattataagaatgatgaaagcattattaattattgatgttcaaaatgattatttcccgaacggaaaatgtgaactgtgtcagtcagaggcggcattggatgtgataaagcgattgctaaaatgtttcagagaaaataatcagccggtctattatgtgcagcatatatcggcagaaaatgccgctttctttatatcaaatacggacggtgcaagtattcatagggagattaagccgctggattctgaaaaaattatagaaaagcattatccaaatagcttctatgagacggatttacaagagaaactgaagaggaattctataacagaattagtagtttgtgggatgatgacgcatatgtgtgtcgatacaacggtcagggccgccaaggatttaggatatcaggttaccttgatatcaaatgcatgtgccacaaaaagcttagaatggaatggaaacaaaatttctgccgatattgttcagtctgtgtatatggcatctataaatggtaaatttgcgaatgttatgacagataaggagtttttatctgaggtttcctaagtcgtgaatgtggtgagtaacattagaaggagttaagacatgaaacattctaaaaagaaaataagtacatatttttgtattgcagtattatgtttgatttctgtatctggttgttccggtcaaaaagaaagtacacctgaaccagagcaggaacagatgcaggaatcagaaactgaattgcagaccgttgatgaaacggagaatgaaaaaaaggaaacgattgatctaaaaaatagttttcatggaataaatggctgtgccgtattatttgatccacaaaagaacagttattcgttttataatgacgctatgtgtgaacaggaagtttccccttattctacttttaaaattatttctacattgatgggattagaaaatggagtcattgagagcacggattctactatgacgtacaatggcactcaatacccaatcacagaatggaatgagaatttgaatttacaggaagcgtttcaatcatcttgtatatggtatttccgtcaaattattgatgctgttggtgaagatgaagtgaaaaaagagttggatgctctttcatacggaaattgtgatgtttctgaatggaatggaaatagtacaaattcaattccggaactaaacggattttggttgaactcttctttgaaaataacgcctctgcagcaggtaaaaatgctagcccggatatttgaaggacaaagtatatacagtgatgaaaatattagtaccttgaaagaaattatgctggttgaggatagcggaatacaaaagatttatggcaagaccggttctggttctgatcaagcatggtttgttggattttcggaggaaaatagtaagaagatatattttgcaatatttttagatgacaatacacaaagcgaaacgattactggaaatactgcaaaagaaattgccatagagatattaaactagcaacattcagattggtgaaatatagggctgacaaatttgttataatgcaaattcgttggctctttttaagaaaacaatttttatctgggttctcttgcaatccacaatcaacgaagcagtttggaaagagccaggggataagtgtcagactgttgttggcagcgtgtatcggtttgtgggatgaataaaaatcctggagttcagtctgttatgaggattgattccagagctgcagcttatataatcgattattttgaaggcgtgtcataaattggcaaataacaattcaactattctgtggcaatgtacggtgagttatggtaaaattctgatgttgcgaattgcccggtagctggaaactcgaatagatatggagaacgctatagttgcaaatcctgtccaaatcatttcataagtccagctttggtaatgtggaaaatttttgttattataaagagaggaaagtatgtggcaattaacatttttaatattttctatatccttttgtatatttgcgggaattatggtgcgtgaacccagaacattatggagtgggatttcattctttttaatgatgatatgtctggctgtttccctgttctttattttatctgactattccatgtggctggcatcacatgatgtggtaattggaatcctgattttcctgtttgctttggcaattggctgtatgcttgtgttcccggtagccttgattgtcgtgttttttatcgagggaataaaggtgatcaggcatgaaggagtgaaaccgtccaatttattatcgatgctgttctctatcttgttgtatgtctacctggcagtctggccaatgattggaaatttaaaaaagaatacattaggaacaatcctttatgtaattattggttttttagcagtgtatgtcttatcattaatggccatgtattcactttctgctattctaaatcttgttcatttgaaaaagaaaagaaatgcggattatattgttgtcctgggatctggaattaatggaaagaaggtcacaccactacttgcagcccggattgaaagaggagtcgaattactgaattggaatcccaacgctgtattaattatgtccggcggacaaggccctggggaagatattccggaaagcgaggctatggctgcatatgcaatagataaaggcgtggatgcagataggattataaaggaacaaaaatctgtatcaacggaagagaatctgttgttttcaagaaagctgatggagaaaaaaactcctaagattatcatcgttacaacagcgtatcatgtgttcagagcattaattttggcaaagcagcagggaataaaatgtgtgggttttggggcaaagacaaaatggtattttacgttgaatgctttaatacgtgaatttataggatatctgagcttaacatggaagagacatgctcttgtgattggcatagtggcagggcttgttgtaatggtcaaaggcattggatgattgagagcggatggatcgtagaaaataaatcgtggaaaagaacggtagcaatgtatgcttacgcatgattgctatcgtttttttgtatttgtaatgattgcgttttcttaggaaaacaagctgtcttattctcaatcaatatttccgttttttagagcggcagttactttttttatctgtcgcatttcttcgggagaaatctgttgctttctgctctgtagcgcagcatataataatttctcgctttctcgatctaaaaaatcatcactcggatattgattgagcagagaggcaaacactggggtcggtaatagattcgttaaaagttcaaaatcctccttatatagctctgcatcagataaaatatccaaaaggtctgccagcgagtggacttcttgcaatatcaatttgactttatcttgactaccatccgtttgtaaaatactatcaagcagtgtttgatattttatatcgttcatgcgttctccgtaagaaattgtgattttaggatcacgttctggataagccggaacaataaatactttgtccatagtttttaagacaactgatttttggatagtttcagcaagtttcggtatgcacaaatggatatagcgttttgaaatttccggcagttccatctttctatccaaatcgcaaaacgcattttcaagaatagattgtatttcttgatttgatttttcagaaaaagactgatagagagaaacaatatcatcttgtgacaaatcaagtctttctgggttgcggtgtaagatggcaagtccaagcgcggatagaaatacaggttcaaacaggttcatgggaacactatgataatcttgagtgagcccacacaacagatggtgtatatcctgcggagcaaagtgcatacaaaactcattttccgcttcaatgcaccgcaaatatcgttcgataaactctataccgtcaaaattgggtctgcccaagtaggcgggataatcagccgtgatgtggatttcctgagcagtaaattgtggcctgtatagtttgaaaaaaccgttaatgccatcaatgattgtggagcgatagtacacatttggcgtgttaagcaagtgagctgctatacgtttctgtcgatggcgtgaaatagctatcttgcgctgcaccaggtttagccccttttcaaaaagagatttcaacggttctgttttcaaaacctctactgcgttttctggcgtttgataggactttaactgtattcctatcacaaaaatggcggatgtcaagagctcctgtgccttttcagtgggaatggaactgctttttccctggttccatttgtcggtctgctccgcgagaattatcagcagttccatttggattttagataattctgcgtcggataacaaaccacaagagtgtgcctgctctaaaagggactgaaagtaacaccttgaatttaattgctccggcttgatttgatgcaaaatatcaagtacgctcatgctgatcctccgaatgatatttgaacgttccaaaagaatgtccactgtgaatatgcctggacaactgcgacaaagcctcgaccgaaagaagttccaacgagccatgacagtgcccgttaaatgcccttttcataaagctgattagttcatcatccgaaacaacgtcccaagtatcatttttgaaatcgtaaaacatttcaatcagttcgtgtaaagtatcttcgtagttttcgtttgttatatacggtgaattgcaaaaggccataatcagcttgtcgatgatgccgctattaaattcaatccgtttggtatcctttaaggcgcctgtccgagtatgtgcgagggcaacagcctgttgtccagttaaaactaatccatataccgctgtatcttgattacaggcaagtattttgtctgttacctgttgttccatcaatgccccgctgattgctgttatggctaaatacgagctctttttgtccattccattctccttttccaggctttgggatatcaaaacggtatcttcccggatttgacttcgggtctttccgccgcatattggacatatcagccatgtgcgatttttcatttcaaatccgttctttcaaaattgaattgataatctgcctaaagccatagtctaaaaagtcactttctgaaatcgaaaactgctttgctatgaattttccttttgtttgggtaagtacaagtaaggcatcaatgtttgaccacaaaatatatactgtcatcattggattaacatcaggatggacaatgcccttattctttccaccctcaataaatcctgccaggagattatttatttctgttcccaaaaccaaaatatgttttactgtgtccgaaaggctattgaaatcaaggttggcagaatttgcactattcacattatttgcggaatgtgggtattcattttgatatttgctcatcgcaatacatatccccttgtactgctccataaaatcttcattgagatttatgctatcctcaatgttttgttttaatataagcaatcctttttcgacaatatgatgtaaaatatcctctttgctttcgtaataggcatagattgtacggcgactatattcagatgcttttgaaatatcattgatcgtagtctgtgcaaaccctttttcagaaaacagtcgttcagccgctttcataatttgttctttgtgtaaagccgcaatagcttctttcttgttttgtctatccataataaaccgacgttctatttagtatactgacagtataccataacacaaaggtacggtcaagccgaaattaaatagtactaaaatccgtccatttttctcgccggacggctttttgcgtaatgtgatagctctgattaattttttttctggttccaggcttttaaaagccttgatattacacattcatatggaaaatgacgcccattacatttatcccggatatttctattcctacaaaattgtagccttacagtaatgttattgtaaggtgtggatggtatactttcataaaatgtaaaatatgggaaaggggtgcttattagagttggtatggatttgttacgatactgattgtgctgcagtttatgccacacgaaagcggttcgtaatatggcggtaacagataaaaatgaactgcaagcacagaaagaacaaatattgccggacgaggaggcgttttatgatggatatgccggaaattaatacagaactgcaaatggtaaatacacatatagaacgattatgtcggtcaaacagtgagtccatgcagaaaatgctggactgggtattgaaagcaagaggcaagcagattcggccgcttttgacacttttatgtgcaaggctgaaagggaaatctgttgatgtgacagagattgcggcggtcattgaaatatgccatacagcttccctgattcatgatgacattatagacgaagcggatacccgcaggggacaactttctgttcagaaaaaatttggcagggaaatggcagtctatgccggagactttatgatttttgcggcaatcagccgaacgggattaaggaagaagccctattacggttcgatatttgagcaactggaaaggatgtgtgatggagaggttagccaatttgagcatcgttatgatacagaaatcacagaggagaagtatattgaaaatattataggaaagacttcggcaatgttttgtatagcctgcggaaccggtgcatatgaaggaaggtgtaatgacagtgagatattagcggtagagcaatatgctgaaaaatttggtctggtttttcagttgagggatgatttgatggattttttacctacagatgatttatcagagaaaaccatacataatgacttttggtgtggatattacacacttccggcgattcatacattttccgattgcaggaatggcgctgaactgaaacaaattgcggaggatatcaaaaagggtctgtatagtgagttgacagacaagcgaatcgcagaattgatcaatgcttctgatggtttcggatatactttgagaatgatagatgaatatgctaaagaagcgaagcaggctctgaatgtgtttaaagattcgattgccaggcaaaagctgcttgaattggttgatacggtttggctgagtgcccataggatcgtgtcagattatttatctaattttccgcttaaaaagtttgctgctacttaagaggccgggtttaaaaaactggaagatacttcaggggaatattatgtcagaaagaaaaaagtggagatcagttataggaataataggacatggctgtgaaagaaaatatgattcgttttggtctatggttatgatatttttcaccatgagcttgacaggatggttatgggaggtctgtcttcacttgatctctgacgggagttttgtgaaccgcggattctttcatggaccgtggctgcctatttatggttccgggagtgtgctgatcctgacactgcttaataagctgcggaaaaagcctttgttggaatttttggcgatcatcctcctgtgtggctgtattgagtattacatatcatggtttctggaacagttatatgatggaatgagatggtgggattacagtgattattttctaaatcttaatggaaggatctgtgtagaagggctgctggcctttggcattggcgggatggtaattgtgtatgtttatgcgccgtttcttgactgtctgttcagacgcattccgaaaaaaatacttgtgccggcatgcctggtattgatcttattcttttgtgtggatctgatatattcaggcaaaaatccgaatcttggcaatggaatcgccagatgccgttaataaaatatataaagattaagcagtgaaaagtgtggagggtttatgattgctgtttatttgtcacccgtttatatgatagccaacagctatctgctgatccgaatccacagatggctgggtgcatgtagtccattgttcagaaaaatatggatgcgtgttggaatcagtctgatctatgtgtgtctggctgcgtccatattgattgcgtttttcctgccgccgggaccggccaggaggattgtgaaactggttagtaactattggctcggcatactgctgtatctgcttttggctgttctgatggcagatctgatttgtttcctgcatttccttatcatgaaacggaggttaaaatgccggaccgctgtagcgggaggaatatgtgcagtggctgttcttgtgctcagtgcatggggaatatacaatgcccgtatcatccatgtcacaccatatgatattactgtcaataaagatggcggaagattagaaaacttaaatgtggtattagccgctgacctgcatttgggctacaacattggtacttcacacatgatgcagatggtagataagatcaatgatcagaatgcggacgttgtggtgattgcaggcgacatttttgataatgaatacgaggctcttgatgatccggcagaactgattgccgtattgcaaaaaattcagtcgaagtatggtgtttatgcctgttatggaaatcatgatgttgaagagaaaatactggcaggttttactttcgggggaaacaaaaagaaagagagcagtatacagatggatgcgtttttggagaaagccggtattcatttgttacaggatgaggcagtattgattgaggacagcttttatctgtatggcaggccagatgcacagagacctggacgtgggatcgatatgagaaaaactgccgttgaactgatgggtgaacttgatacggaaaagcctgttattgtgattgaccatgaaccgaaagagcttcagaaattggcagatgcaggcgtggatgttgacctgtgcggccatacacacgatgggcagatgtttccggcaaatttgattacagcacttatgtgggagaattcatatggatatctgaaaaaagaccatatgcatacaattgtgacttcgggtgtcggtctttttggaccgaatatgcgtgtgggtacaattgcggagatatgttccatcaaggtgcattttcaatagaatgctcttcatataggaattattggaggtaaattgtggaaggtataagaaaatttttaattgtggatgatgatactctttttctcgatcttcttgcacaggcattaagaaaacgagggcatattgttacaactgcttctggtgtgcaggaagccaagaatgctattatgaccgataaattttccctggtatgttctgatatccggatggcagacgggacaggttttgaactgcttgattatatccgaacatcatttgcagaactgccagttatcattatgagcagttacttgacgtgtgaggaccggtttaatgctagaatgctaagggcgttttgggtagagaaaacagataaaaatctggtagatattatagcggattataaagaataaaacacatatataaagaatgggctctaccaagaatgcagctaaaaagtttgtgatcggttagaaaattaaggaggaactgttatgttgcgtaaatggatttctgtattgttactcctaacggtattgatgacaaaccttacaggatgcggtatggatttagttcacggcattataaaggaatacgaagacaataaagatggtatcaaaagtgagcttcatgaactgaaggatggtattaaaaatgaatttaatgactggatgggttctatcagtcaatactgccttaccgaggacaataatttaaaaggcgaacgagaattcggtgttgatgattatgttggaagttatgaagctgagtatatacggtttaacggagaagaatatatcttcggtggtacctcgatggaacgtgaaaatggcagcacactgaaagtaacttattcacttaatattgaatccggtacggccgctctttattggctcggaagtacagacgagcacatcatctttggagataaggacgagcatataattacggaagtgaccgcagaggatgtttacgaatttacttttaatgttggagataactttatcgttctcaaaggcgatgattttacgggaagtctgtcacttaaagttgagtgataaaaacaaacggatattgtcatatacataatgttctattgatgatctggagaaaagataatagataatggtgtagattacaggtttatagggcaaataagagttggtagcaggcatctggaaacagatctaccagctcttttgtattgctgatgataaagttgagataatatacttttagaggtaaaatgaatatggtaggccaaatggaaaattgtaaaagaatcatggggttatttgtgaggagactaaggaagcgaaaaaaggatggtgaaaataaatgaagcgaattttgctggtcgaggatgacctgagtctggtaaacggcctgtcttttgctgtaaaaaaacagggatatctgcttgatgttgcacacaccagcagtgaaacggacagattatgggaagatgggaaatacgacttggtgattttagacgtatcgctgccggatggttcgggatttgacatatgcagaactatccggcagacatcgaaggtgccgatcatgttcctgactgctatggatgaagaaacggatattattatggggcttgatatcggtggtgatgattacatcacgaaaccgttcaagctggctatcttcatgtcacggatcaatgccctactccgcagaagcgataattttaatcaggcggacacagaattgagttccaatggaattacggttcggcttttgaaaagcgaagtctataaaaacaataagcaggtggatgtaacggcaggcgaatataggctgctgtgcctgtttatggaaaatcctgatcaggtgctttcgccggaacagattttaaacaggctatgggactgtgaggaaaattatatagataataattcgcttacggtgtatatacgcagactgcggacgaaaatcgaagatgatccggggaatccgaaacggattgtaacagttcggcgtatgggttataaatggaatacgattgactgaggtgcgctatgaaaatactggcaaatagaaaaataaaagttttatttcttcgggtactgttaggcacattggcatttaccttattgtctgtgtcttttgtaattctgaatctggaagatgcagcaatttatattttgttctgttctattgttataatgattgcggtattggtgttctgtttcctgtatttcagggagcagaacgagatcatggaggatgccgtgacacaaattacagaatatatttccgggaaccgtgcggcacgtattgagtgtgatgaagaaggggaattgtacaggctgttccatgaagtgaatactttggttgccattttgaatgcacacgcagaaaatgaaagaaaatcgaaacagtttttgaagaataccatatcagatatttcccatcagttgaaaacgccccttgcggcgctgaatatttacaatgggcttatgcagggggaaacggaagaactgccggagcttcaggaacttgcatcactttcggaaaaggaacttgaccggatcgaaatgctggtgcagaaccttttaaaaataacgaagctggatgcaggttccattgtgtttgaaaagacgtctcagaatgtggcagatatgatgggggagattgagctgcattttgcgtaccgggcaaagcaggagcagaaggagctgattctatcaggagatgagcgtatttcaatgctttgtgaccgtgactggatgatagaggcactggaaaatattgtgaaaaatgcctttgaccatacaggtatcggggattctattcagattgagtggaaaccgactgcgtctatggttcagattatcataaaagacaatggaagcggtatccatcccgaggatctgcattatatttttaaacggttttaccgaagccggttttcaaaagataaacagggaatcggccttgggcttcctcttacaaaaatgatagtggaagcgcataacggtatggttgaggtagatagtgaattgggagttggcaccacattcatcctggattttttaattcctacaaaattgtagccttattgtaaggagaccgtaggatttcggtgttatcctttcaggtataagcgaggcaggcgaaatgcaatccgctgtgccgaagcgaaactattttgaaagaggtgcttacgtatgaatttattagaagtccataatatctgtaagacttatggcaaaggtgaaactgctgtaaatgcgttgaaaggcgttagtttttctgttccgaaaggggaatatgtagcgattgtgggagaatccggctcaggaaagagtaccctcttaaatatgcttggggcgttggatacgccgacatccggcaaagtactgattgacaacagggatattttttccatgaatgacagcaagctgacggttttccgccgccggaatatcggttttatcttccaggcatttaacctgatcccagaactgaccgttgagcagaacatcattttcccgatgcttttagattaccagaagccgaataaaaaatatctggaagaactgcttgaggtgctgaacctgcaggaacggagaaaccatcttccgacccagctatccggcggccagcagcagagagtggccatcggccgtgcgctgatcacgcgtccatccctgatccttgccgatgaacccaccggaaacctggattcccagaacagcagcgaggtgattgccctgttgaaagaggcttccagaaaatatgaacagacgatcatcatgatcacccataaccggaggattgcacagactgccgaccgggtactgaacgtatcggacggtgttgtgaccgatctgggaagggcgcaggatgaatcagggacatatgctctgcgccggcaggaacggaaaggagacagaaaatgagaagttatttaagtcttgttccgatatccgcaaaggttcgcagacgccagaaccgtatgacgcttctttgtattattatttcggtatttcttgtaacggctattttcagtgtcgcggaaatggctatacgggcagaaaacgagacgatgcagaagaatcatggaagctggcatatccggttggaaaatatttcacaggatacagcaaaagaaatccgtcagcggtccgatgttacggctatcggctggtcagagggatttaatttagatgcagagcagccatactacatcaatgagaaaacggctgccttatatggctcggatgaaacctatattgtcgggcttgcgaaagctcttgaggagggcggttttcctcaaaatgataacgaggtaatgctcagtgcaaatgcgaagattgccctggatgtacagatcggtgacagtgtgactttgcatacgcccggcggcgatgcagattttacggtatccggttttggctcggatgataagaagtattatcagggacagacatacatggtagccgtatacatgacacagacggcattttccggtcttatggataagaacggaataacaggtaatccggcatgctatgtgcagtttcaggatgcggcgaaagcctccaaagcgatttcagagatcagtcagcagtatgatctgccggaaggcagtatttcagaaaacactgccgttatgggtgtttcggggcaaagcagcagtagttccatgcaaactatctatggaatagcagcggttttgtttggtcttgtattactggcgggtgtattgatgatttccggaagcctgaacagcaatgtggcccagagaacaaaatttttcggtatgatgcgctgtattggtgcaagccgccagcagattatccggtttgtgcggttggaggcactgaactggtgtaagacggcggtacccattggactgattctcggaacaattaccagttgggtcatctgcgcgatactccgctacggcgttggcggtgaatttgccacaatgccggtatttaagatcagcttcgttggactgattagcggagtggcagtgggacttgtgacggtgcttttggcagcgcaggctccggcaaaactggctgctaaggtttctccgatgtctgcagtttccggcaatgcagaaacagtctcttctgtaaagcatgggtcaaaacggagcctgggcaggattgagagaacattgggggtacatcatgcaaccgcatccgggaaaaactggtttctgatgacggcgtcttttgcactcagcattattttgttcctttgtttttcccttgggatggattttgcacagggactgatgccgactttgaaatcatggcagccagatattacactcaacggttacagtaacgcacttgtgctggaacaagatctgaaggaagaaatcaagaaaatatcaggggtaaaacaggcttttggcagttcctatatggacagtgttccggcggtttcctcacgggaggggattgatcatatcaacctggaatcctacgatgattttcttctggaaagggtaaaagaggatgttgtgcagggggatttatcggacattgccggggacagtggcaaggttatgacggtccgggataaggataatccgctgaaagtaggggacacccttcagatcgggggaaaagaggtggagatcacctgtgcggtttcttccagcatctttcccagtgaaatgcttgtcatctgttcccaggaaacctttgaacggctgacaggagaacaaaactatacaatgatcggcgtacagttaaatgaggatgcagacgatgagacagtaaagaatataagtaatcttgcagacagtgacgtgatttttgcggatgatagagatatgaacagggagagtaatcttacctatctggcaatgaaggctctggtatacggattcctggcaattataggcttgattacgatgttttatataatcaacagtatttccatcagcgtgtcggttcggacaaaacaatatggagctatgcgggctgttggtatggatggcagacagcttacctggatgatttttgctgaagcattcacttatgccatttcgggtctggcagcaggctgtgtgatcggacttccgcttcattactttttatatacccggttgattacgcagtatttcggaaagatatggcatctgccggctgtgatgctgtgtgtgattattgtgtttgttgctgcctgtgcttcccttgcagtttacgctcccgcaaaacggatgcggaacatggcgattacagctacgataaacgagctgtaaatggggcgataaaaaactgcggtacagtagaaagaaaaagctgctgtaccgcagagtattttatataccagttttaggattggatgtggaacatgaaagataagacctgtatttgtattttaggaggaaccattcagagagtaaaggaaatggcaggaatagtaatcctgtgtgcttttatcatcctattgtgtatgatgtttgttgcgattggtattgtatggttatttgcagattgtacaatcagggagttggagaaggttggatgcctatgagaagaaagcgaagaaagaaacatcctgttagaaaattatttattagtttgttttccgttctgctttgcttgctattggcgtcctgtgtcttttttggtgtaaagggttacaaactgtaccagaaggcagtcacggaaaagtctgtcaatgagcgagtaaaagaaattcaaagtatggatgggtttactccgtattctgatttgccacagttttatatagatgccacaatatctgtagaagatcacaggtttgaaagccactttggaatagacctgattgcgattggccgggccgcattaaaagatatcagagagatgtcttttgtgcagggcggaagtacgattacacagcagctcgcaaaaaatatgttttttacacaggagaaaaagctggaacggaaagtggcggaggtatttgcagcattggaactggaatcccaatatacgaaagaagaaatttttgagttatatgtcaacacggtctattttggaaacggattttacggtatccgtcaggctgctgtaggatattttggaaaagaaccctccgaattaagtgattatgaatgtgcggtattggcaggacttcccaatgccccatccgtttattctttggatgaaaataaggaactggcgttacaacgagtggagcaggtgctgcgaagcatggtaagtaacaaaataattacacaggaagaagccgacaggatagcgttaggggattagaaagggagatggatacgaatgactttacaaacatttattaaacgccagcctgtcatccaacgaggaaaccttatcattgatccacagtgctgcacggttttattagaatcagaaactatcagcctctatcccaaagaatttgatgtccttatcttgctggcacagtatcccggttgggtattttcgctggaacagatttatgaaactatttggaaggagagcgtggctgggtgtgagcatgtagtttataatgtcatctgccaacttaggagaaagctgaagaatccggatttgattcagacgatggttgggagagggtatcggtttgtgggatagagaaatacccccggagcagtgaaaaataaactgtttcgggggattttactgattaggatactgtacgatgttttgagtaattgctttctgttttagaattatcagaaaatttaaggatacttaaggttatctaacttgcttgtttcgtcttaacgaaatataatagtacccattaggagggggaaatgcaacagggcatttctgcccgctattccagcttatcttgaaaattttcctgttcactacctacaacaccacgcaagccggaaaaggcggacaatggcagtattttttctttgataccctctacggataagtaagggattttgccaactgcggcggcaattttcccttttgtttttttcatactggggattttcaaaaatgccgaacaggaacgaatagtaagggggcggcagcactttaggctgtccctccttgactgcctaactgcaaaaccgggcggggctgtcaacggcgggcagaagtccgttcatcttgaccgttgactggctcgactagctttgctattcattcgataaattctaattcatctttcttttttcttatcctgccctaatgcaataaatcccactgtaacagccagtgcaagtataatgtcatgctcgcctaatggattgactataattgaatataccagatatgctgtgcaaagtaacaatatcgccagaataattctacgcacaatatttctgttcttaaacattttatgtcctccttataaccgcttgtcaaaataaatcgttgcaaccagttcaattaaattgcgtattccaatatagagcaaagcaaaaattgaaactcgttggagtgtaactgttgtttgcatacttataaaaaatggtaggacaacaattaaaactatcaaaatcgaatgtgctaaattcgcagcattattcgcttttaattgtatcagttgccagcgttcgtctcctttgtatttcacttgcttcttggcttttgaaatatatagccaaagagttgtgcctaatgcgataatgagaaaagctacgataattatttgttcattcatgttatttgtcctccctatgctcaaaaacttcaccaatagaaacaccaaaggcttctgcaatcttaaaagctaactctaaagacggggtatatttatatttttctattgatataaccgcctgtcgggaaatcccaaccttatctgccaaatctgcttgtgtccaatctctttcagcccttagcactttaattctattccatatcaatgtcatctctcctttccaaaatgtaatgaagtgattacatcaataatgtaacacactcattacattttgtcaagcgcagaagcaaaaaatagcgcaaaagatttcatagtatttgacattgtgggagtgtgtataacggcagtcttttgttcggaatagtgtggtactggcggtctatcttttgctttcggttgcttacttctttaccgcacatgagcattatctcatagcaaagtttggtaacgcaggaggtttatgtcctttgattgataaagacggtaagccgattataaccgagtaaaaatgtttgttggggtaaggaaaagaatggtttgcgaggtgacgttattataggaaaaattcttatactgacttttgcagattctgaagaacatatcgtgaataaaatccttacagaggtggaaggcgagacgggaatggaatatatccaaaatcctaaatctccatctgttctcacctttcctggaccggaaatccgtatacatgaacaagccgtctatcacaacggcattctcattcccctaacccaccatgagtttttcacattgctttacttagccgaacatccatcctgggttctctcacaatctgcaatctacgaagcggtctggaaagagaacccggagcattgcggttcagcagtaacgaatgtgataagccagatcaggcggaagattgggaatgagtatatagaaactgtggtggggagcggatatcggtttgtggggtgaaaaagagctggtggcaggcatctggaaatggatgtggctatcggctctttggtattgcaaatagttacaaaattatgattttattcatattggctccacatgaatggtgtattatgatgaaatggaggtgttatgtatgtttcaaattatggttgttgaggatgataaagagacaaatgaagcaattagtgaatatttgcgtgaattaggatatggtgtgttatctgcttttgatggggaggaggctttagaattatttagtgaaaatttggttgatgttatagtattagacattatgttacctaaaattcctggaatatctgtattacataagattcgagaaaaatcaaatacaccagtattgatgcttaccgcaattagtgatgagtatacccaaataacaagttttgatgaaaaggtggacgattatatgaccaaacccttttcaatggttttgctaggaaaacgagtggaagcactgttaaggagatcaaatgtatgtatgaatctggatgtaatgcgttttagtgatatcacagtggatttttctggttactctgcaactgcgccgtgggggaaaatagatatcacgccaaaagaaattcaactactcaaattttttgttcagcatagaggaatggtgtttacccgcaatcaaattcttaatgctgtttggggcgaggattcctatgtcattgacaggactattgatacttatgtgagaaatttaagaaagaaacttttgttgagtgatattgtgacagttaagggtattggttataaatatgaggtggcagaatgaaacagacaaaactatttacaaagttatttatatcaacattaatgataacactgtttatcactttattagcgcatgagcttttgtttttgtttgcacctgcgttgagcaaaagcggaactatatttgaaggggaaaatacagcaatggaaacggtggaagattttccgctgttgacggaaattacatttcaagctgatgattatatttctggtgttattagaaaggcgttgccatattctgtgtgcatatgctgtattgtttcttttattttttcttactttttttctaaaatggtttcggctccaataaaaaggatatctgaaaagacgtcagaaatggcaaaattaaaaaaagatattcgatgttctgaaaatttttgctttgaaattagtatgctttcagagaatatcaatggattgtatgaaagtctctttgctacaatagggaatttagaaaaagaaaaaaacaaagtaagcgaagcggagagcatgaaagttgatttcttacgctctgcatcgcatgaattaaaaaccccggttacagcgcttaatgccattttggaaaatatgattcttggtgttggcaagtataagaaccataacatatatttgcataagtgtaaagaaataacagaaaaacttggagagatgatctgtgaaatattaagcacgtctaaaatgaatttattttcggaagatgagaaattggttgaaactgatttgaaaatattggtctcggatttatgtgttgcgtatgaggctattgcaaaaagcaaaggccagatatttaaaagttctttagaaaattcatcatcagttatgttgcgccccaatttatttcgtaaagcgttatcgaatgttttaacaaatgcagtcttgtatactgatggtggaaagaagattagtgtatcgtttaatgaaaataggctgattattgagaatgaatgtattcctatacctaaagaacatctgaaacatatttttgaaccattctatcgactggattattcaagagacagaaatactggtggaaatggtttggggctatacttaacggctataattttagaaacattagatatttcttttgaatttttaccatcgcctatgaatgacggtatgcaatttataataagtttttaagaggggcggctcgtaagggccgtctttcatattagtttcatatagctttcatatatgtttaaaatggctttgatatgattctactgtaaacaatgaaatctattagatagcaggaggttcattatgaagacaaaaaaattgctttcggtttctacattttctttagctttattagtggcaggatgttctgccatatctgcattttcacaatccccaacaaagaacaaagttggagcgttgccgacgcaatcagaatctagtgctgaagttgatatggaaaaatcagcatcagctgtatatgagcagcagaaaaaagatgggagtacagtgtatagcatagatgggggaaatacttggctaagtaaggaagattttgaaaaagaatatatgactcacagtatcgaatggtggacttatgatgaatatgctgaatatattgaacagcagaaagtttctctgcaagaaatggtagataatcaggttacaggctatactgatcagcgcggatattttacatggacacaggaattggccgatgaaacagttcagaaatatgagcaggatttagagcagataaagaatggggttaaaatatcaaaatctattgagggacttgatgatgattgtgcatatgaaagttattctcttgcccccaaaggtttgccaacagtaagttttgaagttaatttgccagatggttcaacaaaacagtttacaggtgataataaagcagaggtatatgagaacgtaaaagatttttgcaatcagcaaatgaagagtggaaaacttactcaaaaacaagtagacagtattcttaatgaggtacaataggattagttttaaaaagtttagaaggaacgatacgggaagcagtaatattaagtcgctataaaaagctggaagaaaaattgatcgttttatcaaagaagtgacacggctgggtgcgagcgtgtgatctataatgtgatttgccagcttaggagaaagctgaaggacccggatttgattcagacgatggttgggagagggtatcggtttgtgggatgagaatgttccagagaaatattgtagttgctctggaacattcttataagtgggttttggtatttttggcataaaatcctatgttaccatttggtttacatggattttgcagggtgtttctttcatttggcggcaggatattttataatcagcctatcctataggaatcaaatcagaaaaggtggttgataattatggtggaatttggtgaaaaactaaaaagggcaagagaggaaaaagggatgacgcagcagaccttgtcggagcatctctatgttacccggcaggctgtatcacggtgggaatgcggtgcgaggtatcccgatctcctgactgctaagagattatcggaggtattggaagtatctctggatgagctgctgtccggtgaggaaatgaaaaaatgcgtggagaagaatccaatcgtggaatcgcccgttataggaagggtgcagtcggcactgtatgcttttgcaggaatggcatatctgcttatgagtgtattggcaatccgttttcttacgccggagcttactggggcgagtctacagatgatgggatatggagtttcctatttattagggcatctgatgattacgctgctactttttaccgggctggcattttccatcagtggaaagttaacgcctaaaaggacaggagtgattgcagcggcttattttggaatcggaataatctcaaatatttttgcacttacacaggcacccggtatatggctggtggtacttcaaagcatcctttacctgatctgcattgcaattgtggccggatattattttcaggtgagaagggtttctccgatactggtgtattgtgtggctgcgtatggttttataagaagcggaatcatgtattttcagatgatgcaattagaaaatgaatttgcatttatcgtaagaacgatatggctggcagcagttgcagggtatatgggcctgacggcataccaggcgtatgcgctggagaaaaaatggcggttggctgtgaaatagaaaatcaaagatgtctggcaagaaatttcaaagactaactattaaaagtcaagtctaaaaatgaagttttttgaatgaattgcagaaatgcatttcagctttatttgaaccttgaaaactgtatgacaataagagcatctttgcaggtgctctaaaaggagatatttacagaataaagttaaacggttactcggtatgcctgtcctgatttttccatagcaaaaattgttcttacaagttttttcgtggcatgggacagggcaacattatagtgcttgccttcggaacgtttcttctccagatatgcaccgaaagattcatcccagtggcaaacgtatttggtagcattgtaaagtgcatagcggaggtatctggaaccacgtttttccatatgtgaataacaattatccagttgcccggattgataagtggagggtgacattccggcatatgcaagtattttatccgcagaatcaaaacggctgaaatcaccaatttcagcaagaatcatagctcccatccggtaactgataccgggaatggtaaggataggggatttgatttcttcatccatgatctgcttgatagctgtttcaatttcatcaatctcagtagttaattcctgaattagtttgatggtatgttttagttccaaagactttgctggcataacagagccgatggagtttctggcagcttctctgaaaagaatggcggtatccttgccgtaatgtcctttcgagctttgagaaaatagatttgccagctttgtaaggtgtgcagatgccacatgggaagcaccgggaaattcggataacatagcataaatcgaagccatatgaagcgtaggaaccagtttttcgagttccggaaacagaatatttactagtctggaaatagaagacttcaatttagcccgctcctttactttatcgaaacggtaacgagtaagtgactttagttcttcgttgtggtaagatatgtctgagtaggacttcaagttcaaatcagacattagcatagcggcaatggtatgggaatcaactttatccgttttcgtctttctaaggcttagactttttctgtaaagattggtatgtaacggattgataacacaggtggtcagacctttatcaagaaggaatcccagaagattgtagctgtagtgtccggtggcttccagtcctacttttactttagttaaatcatctgaaatagatttaattctttgaaataaggtttcaaacccttcccgattgttagagatggtgaacgatttgaataatacttcgccatctgagttagtgataaaacaatcatgtttatctttagcaatatcaattccaacgtaaatcataaaaatactcctttgcataaaatttgatactgtttagaaccactggtactctttgcgattgtaacctcgttctaaataaaccgtcatgcggtatctaactgattaacaaatatacaaagagactgtggttggagcctttcaagaaccatcaagtggtaggaggtggaaaccaatccacagtatctccaatagtatagcatacagtccttggagagggactataaacactactactttataatacgaggaggtggatacaaatgcttttacaaacaaatatcaaacgtcagcctgtcatccaacgaggcaatcttactattgatccacagtgctgtacggttttattagaatcagaagatattgatcttttcccaaaagaatttgatgtccttatcttgctggcacagtatcccggttgggtactttcgctggaacagatttatgaaactatttggaaggagagcgtggctgggtgtgagcatgtggtctataacgtgatttgccagcttagaagaaagctgaagaacccggatttgattcagacgatggttgggagagggtatcggtttgtgggatagagaaatccccccggagcagtgaaaaataaactgtttcggggggattttactgattaggatactatacgatgttttgagtaattgctttctgttttagagttatcagaaaatttaaggatacttaaggttatctaacttgcttgtttcgttttaacgaaatataatagtacccattaggagggggaaagatggatttcatgacgacaaaagaagcctccaagaagtgggaactgacagaacggatggtacagtatcattgtaaagcaggctgcattcctggggtgataaaaatatctggcgtttggctgatacccaaagaggccgggaagcctagtgatggacgctggaaagaaagctggtgagtgtttggatggaacaaaagattttattagtggatgatgaaaaagacattgtagatttgatggaagaagtgctgatccaggaaggattccagtcaatccgaaaagcctatacggggacagaagcgttggaactttgccatgaattccagccggatgtgattgtactggatattatgttgccggacatagacgggttagaagtttgtaaaaagattagggatttctcttattgctccatcttgtttctttcttctaaaaatgatgatgtggacaagattctggggctttcctgcggcggggatgattatgtcacaaaaccattcagcccgaaagaagtagtattccgcatcaaagcgcagttaaggcgccagcagtatcaagcggtaccatataaaaataaggaggcatctgttctgagtgcaggaccgctttccattaataaggagagctgccgtgcatataaggatggcaaggaaatcagtctgaccggccgggaatttcttctgctgtcttatctggtggagaacgcggataagattatcagcaaagagcggctgtatgaacaggtgtggggggaatacagcagcatttgcgataacacgatcatggtgcatatccgccatttgcgggaaaagattgaagatacgccatccagcccgcagcagcttgtcacggtgaaaggcttgggatataaactcaagaaaagggttgattaaatgaagcaatcagggtataagacaatattccatatttacctgctcttttttctggcatttttgggtacggttattctggctggagtcttggtttttatgacgattacgatccggacaccagatggtatgaccgcaaggagcgactggccgaaaacatttacagaagattttgcagaacatattatttttatagattccaggccacaagtcgatcagtcaggaatagaactattgcgggataaaggggcaggcatccagatattagattcgtccgggtgtgaagtgttcggccaccagaaaccggaacagacggaagaaggatacaccagtgtggaattgctccagctttctcaaaggggaaagttggaaaacagtgatgcggctgcctttattggcacagtttccagtgatggaaaagactacacttacattttatatttgcctgtggatgtttccaaactcacaatgtatgtcaatggagaccggttttatggaggcaaaaacatcatattaccgattttgtccgtgttgttcctgctgattttgctttccggtgttctctatgggttgtggaccacaaaagcagtgaaacgtcttatggcatccattcaggaaatatcaacccgcagctatcttccggttgaagatcatagcgtgttccaggatgtgtacgatagcctgaacgccctggatacggaaatcaggatcagcgatcagttgagggtacagacagaaaaaatgagggaagaatggattgcaaacattacccatgacttgaaaacgccgttatcaccgattaaggggtatgccgaggtactccaggaggatggggaaaagagtgagaaacggtgtaaacgatatgcagcagtgatacttaaaaatgccgcatacatggaaaacctcatcaatgacttaaaactgacctatcagttggaaaacgggatgtttccggttgacaggcaggaaagagatgttgtgcgtttcctgaaagaactggtgattgatattctgaatacaccggagtatgagacccgtgtggttcattttgaaaataaagagcctgttatccgttactcttttgattccacgcttttaaccagggctttccgtaatttgattattaatgcctttgtgcatggaaaagagaacacagaagtaacattggagataaaacgggcgggaacatcattgcagatctttgtgtctgataatggggaagggatgacggcagaggagagggaacatttatttgatcgttattaccggggaaccaataccgagcaggaaacggaaggcacgggattgggacttgcgattgcaaaaagtattgttgagcttcatgggggattgattactgtttccagcatccccggaatggggaccacttttcagattgattttccttcccattaaggttacttaaggttgcctgaaaattagattaaggttggtacgctattatgcttatgatagctgccaaccttttttatatttcaggaggtgaaaaatgaagtcaggaatgaagaaagtcttaccttatgtgtttcccgtagctattacgctgtttcttggttttgtcatcgtggcatttgttctgcgtcctcagaaattagaaatcggtactgtcaatctggatacggtatcggatggagagtatgtgggggtgtgccagaataaaatcctttttgcagttgtgaaggtgaaaatacaagagcataagattacagatgttgaggtcatagaacataaagcatcctatatggagcaggcaaggcagattgctgaacgtgtatgcgatgagcagtcgttgaatgttgatgccatatccggggcaaccttgaccagcgacacagtaaaaaaggcaatcgaaaacgcattagaggacgccggaacgtccgatagaaagtaggtgttatcttgaaaattatcatgaaatacattctgacgaatgtgaaagagcgaaagacgcgcactgcggtcatgctgctatccatacttttatccaccacgctgctgtttgtgtcattctccatcggggcatcttacgagagcgcacagagaagaatggcaaggggcatggcaggaagtgcaaccgtttccgtggaaggagcagatggggccattgataagaatgccatcccggaactgaaatccataaaatcctgtgtaggtgttctggagggatcggccctttaccatgaaaacggatattatgagacgatggatctgattgccgcagatctgacagagcttaaccagatcaatccgccccggctggcagacggcggggagatcctggacttctcaggaaaccaggtggtcttaccagaccgctttacttccaaatatgggattgaaaaaggagatacgattgttctgcaaattggcggggagccgaccacactggaagttgccggggttgccgcctatgatacggttttcttacggcatacaagaggagcaacagcacttttgccaatttccactttgagagaacttttgggacaaacagaaggatatagtaaaatcctgatggaaccggcagatgccgtttctacgagtgagttgaaaaatgaattgtccgttgcattacctggcggtgaataccaggtatcagaggtggtaaacgaagctcagattactgcggatgcaaggcagaaatccatgccgtttttccttatcagttttttctcactgactatgagcgtctttatcatttacagcagctataaagtgattacgttagaccgcctgccagtaatcggaactttccgaagtattggggcaacacaaagcaatgttacccgtatcctccttctggaaagtgcgttatacggctgtttaggaggagtgcttggaattccggtgggaacggttgtattgaaactgattctgcggggaatggggcagtcactgtcacaggggatagaaatcccggttgtcatgtcgcctttcggcattttattctctttttctgtggccctgattgtatccctgctttccgcatggattccagtacgcagggcaagccggctgcctgtcaaggaggttgtgcttggaacagtggaagaaaaacaggttccccgtccagtaatcgttggcattggtctggtgctgtttgccgcatcggtcattctgcccaaactggcatcgggaaatatgctgtatattgcgggcgggttctcactgcttggtctgattgccgcaacgatcttaattgttccgcttttgacaaacctgctgtcggcagggatggaacgtttatacggtgggatatttggaaacgaaggaaggcttgcggctcggaacatgcgggacaacaaaaatatgatacagaatatcacgcttctgtttattagtatttccgctgttatagcaattacggtggtcggcgattttgtaacaacctatgtgagtgatgtatttaacggagcagaactggaaggttttgcggacggctatatggaaccggaatttgtcgaacaggtcaaagaaatggatggcatggaaaaggtccttccggtttatgtctttgagaaccagatgcagggaaacggcctgacatttacccgattggaggcaactgacaatgtggaatggtacagttctatgctggcgcttcattatacgaaaagcgggatgaaggagcagacagtttctgctttcagcgaggaacgggcggttctgttgagcgaaagctgtatggagcagatgggtgtatcggtaggagatatgataacactcgcaaatggaacaggacagagcgaataccgggtggccggaagtttcaaatcaagagctacagatgtggaggcggtgattccctccaagtatgcggagattgattttggagcgagcgtgtatggcttcctggcttatacagccgccgatccggatgcggttatgatacagatccgtgacttatttggagaaacctcaaactggagccggactgtggaggagtttaacacggatgcactgtccacagtgggggcttttcttcagcccatgcacagcatgacctatttcattctgcttctggcaactgtgggtattatcaataacctgctgattaattatatccagaaacggagaaccattgctatgtataaatccgtaggattaagcaataagcagaatagaaagatgacactgatcgaagggctctcatcgggactgatcggcgcagccattgccatttttgtttcctatatggaaatacagacgatcttccttgtagcaggccccaaaatatccacagtaccggaactggacgcaggcgtattcctgagtgcaggtgcgatgggaattgtggttacactgattggttcggttgttccgatatttaagagtcgtcagatgaaactggtagaagaaatcaagtttgaatgagagattggaggttttacagatgaaaacaataacaggagcgattgctgtggaagggaaacatattgtaaaggactttcagatcggcaataccacgacaaaggtgctgaaagacatttctttgcaggtgatgcagggggaatttgtttccatcatggggccgtccggttccgggaaaagtacattactgtacatccttggcggattggatgcgccgaccagcgggcagatcatgctgaacggtacagacatttctaagtttgatgatgagaagatgagcaggatcaggcggcagaaaattggatttgtttttcagttttataatcttattccaaatctgaatgtggaggagaatatcatgctgcccttacttctggatggaaagaagatggggaattacaaaaagcaactggatgagattttggagattgtgggactggcagaacggaggaaacatacgccccgtgaattatcgggcggacagcagcagcgtgtggcgattgcgcgtgctctgattgggaaaccagaaattttatttgctgatgagccaaccgggaatctggacagtaagacaggtgctgagattatgagtctgttgcgggaaatcaatcagagcagcgggcagaccattatcatggtaacccattcaccagaagcggtcaaaagtacaagccgggtgattactgtgcaggatggagtgctccagaaatgcgtttaaggaataaggatcaaggtttgtattattgggcaggggtatacccattcgggcataccgcatatcagatgctgcgcatgggcgtgctccggcaggctccgcacgataaagtatgagttttcaggcaaaaggaccctggaacagtccgaacattggctgaaccaggggactctgtcctatttcgacatattttgtcgaaagatttttaaaattatataccattcataactcattcataggtcattcataactcggtgttttataatgacagaaaaagagagaaactagcagtacaaggaattctgttcttactggtttcactcagatattttcatttttatatgatgctctgtcataaaaaagaaagtcagacttaggagtatataaaaaaagtggggagtgaaatatatgaccaatattattataatagaggtagggaataatcaggagatcattcaggatgttattaagcttatcgcggaaaaagaggaatgcaggtgtacgcagattcagctaaaagcatcggaagagaatgaagtgctctcttttcctggtctgtgcatagatttggcgcagtatattgtccgcagggaggataagcagattgcaatgagcagctatgaatttcatgcgcttgtttacttggcaaaacagccggggcgggtatttacgaaagaacaaatatatgatggggtgtacggtgatgagaaaatcgtaaatattgataatgctgtctactgtctgatcaggggcattaggaaaaagctgaaaaatgagtatatccagatggtgagaggtattggatataagtttataatcccagaggaataaaatcttctgggattttttacgcttattttcacaagaagttgctctttcatccgctccatcgtacagagatagtaaaagcatatatcaaaaagtacgctttttaggatatatggaattatgggctatttatatatctaaaagtctgcatgggggctttttaagatatgtcaaaagtatcgagacattttgggatatttaaggagtggatgggtatggctgtgtatggatatcatcgaaccagtaccaaggagcagcatctggatcgagggatttatgaaatcaggaagttttgtaaagagagcaagatggaactggtgaatatcttcaccgatcagcagacgggaaaaaattttaaccggccaagatatatcgttcttttggaagacgttctgcggccaggagatattctgctcataacagagcttgatcgtctgggtagaaataaaagagagaccatgaaagagattcaaaggttacgtgatatgggagtgcgtcttatggtacttgaacttccgacaacgcttatggatatgtctaaaatggataatactttggcgaaaatgatgctggagacaatcaacaatatgatgctggaactatatgcttctatggccgaggctgaaatggagaaaaaggaaaaaaggcaacgggaaggaatagagcgtaaaaaggggcggggagaatgggacgattatggacgcccgccagcaatcaaacaggaggtgtttaatcgggcatttgaaagggtgattgcaggtgagattggcccaacagagcttcggagggaattagggcttacccatgctaccttctaccgataccggaaaaattattttgaaaaaaatccccaaattcttaaatctggaaaataacgtcactgttatttagatagaaaagaatatttaaagtagaaggaggaagttttcttatgagcgaggtacgtgttggaaatctgttttatgatgcagaaagtggaaggtatgatatccggtttgggatggattcctattatgaaggcttacattgtggagagtgttttgatgtgaaagtagaggacacctgggttccggttcggatagaaatggatgatgaatggtatctggtcggtcttccaaatgtaaggctggacggattgactgtccggattcggatgtgaggagtggatgggatggaagcgttacaaaaaatgagatatgtgaaaccagccatgaaatttgtggcagatgttgatattatactggaatgtattcacgaagtgtatggaatggaaggcgtacaggtactgtcgggaaaaaatattcataacaccatgatttatccgtttatgaaaatgttggagaatcactgctccaatgtttcggccgagggactgcataaagtcttgtgggagatctacgaggaccatttagagaaagcagattttcttgagaaggcggaaaccataataaaaccatacttaaaaaatgaaaaggaggataaacaggatggataaaaaaatcagatacacagatcaccatgtaataatttctgaaataccgaggatgtataatcagatattagaaagactgcttgaaaaaagagatttggaaaccgtgttgtatctaaggatgatgatggaaaccggaatacgctgcagagatctgtgtgagctgaacgattctaatatcaaaggaagggaaatcaaaatatcagcactgaaggacggaatggagtatcatgattttcaaggaaagtatccgaaaatttctaaaaggactgcgcagattgcccggattgtattccgggatggcgtgtgtttttcagggacacaacagaggtacatgttcagaattagaaagtgctgtgacaatcccgaatttcatccatatgttaaggcgttattatatgcacatcatgttattacgagcgtataaaaaaggtgtcctgattacaagccggcgattgttctggggagacatccaataagggaatcttatttttatgtacaaatttgcttttgtatgataaaataaaagcaaatttgtattggcggtgatagatatggaaattcagaaagccattgaacgtatagcagaagatcataatgggattattcggactaaagacattgtaaatgccggactgcggagggaagtgctgcctcagttggtaaaagaaggaatactggataaggaaagcagaggggtatacattctttctggagaatgggcggatgaatacgctatgcttcaaaaaaaatatccgcaatgtattttttcctatggcacagctatgtatttctggggaatgtcagaccgggtgcctgatccgatttcggtcagcgtcccccagggctataatgcgtcctgcgtgaagaaagcatatccaacgattcaggtacattttgctaaaaagcagtggtgggaagtcggaattacggagacggattccccacaaggcggtaagattaaagtttataacaaagaacgttgtatctgtgatttgatcagggataaagagaaaatagaactgcagctttatacccaggctatcaaagattacttcagagatggaaagaaagatatccgcaggctgctgaaatatgcagaactcttttctgtggaaaagagagtgcggtcttatatggaggtattgttgtgaagtcaccagagcagttaaaaggtgcagtaaagaatattgcgaaacagaaaaagattagtccacaggcagttttgcagacgctgatgtttgagagattagttgagagactgtcagcatctgagttccgggatcgttttatcctgaaaggcggtttgctgatctcctctatggtaggaatcggggagagaacgacaatggatatggatacgacagtaaaaggactggacatgaatgaaaaagagattcggtccacggttgaaaagatattgtcggtggatgtcgatgacggtgtgaattttgtcttgaaagggatttctccgattagggaagatgatgaatacgagaatttcagggtatcgcttttagctgcttatgggaaaatgaagataccgatgaaaatagatattacaacaggcgatgcaataacgccgagagaaatcatatatcatttcccgttgacgtttgaaaacaggagtgtagatgtttgggcatatacattggaaacgattttggctgaaaagtatgagacgattataaggcgggggacggcgaatacgcgggccagagatttttacgatctgtatttattacataagatgtatgcggaacagattcatatgacagacttaaaaagagcggtggcactgacatcccaaaaacgcggatcagaggcagatatgaaacaggcagatgaaatcttgaaggaaatacagaactctgatattatgaggaaattatgggaaaaatatcagagggaaagtctgtatgcgaaagacatttcctttgattcagtgatagaatgtgcaaatgaaattgagagattgcttcggtagaaaggaataggagtgaggcaagttgagatattatattgctgatccacatttttttcatgccgcgttgaataccaaaatggataagcgtggctttgaaagtgtagagcagatgaaccaatatatgctggatagatggaatgaaaaggtccgaaaaaatgatgaggtcgttattataggggatctatcctggggaaaagcggaggaaaccaatgagctgctcgatcggcttaatggccgcttgtatctcatccaggggaaccatgaccggtttttaaagaataaggattacaatgccaaccgatttgtatgggtgaaaccatacgaggagcttcaggacaataagcgtaaggttattctttgtcattatcctgtcatgtgttacaacggtcagtatcgtgttgatgaagaagggaatccgaaagtatatatgctgtatgggcatgtacatgatacgcaggatcagcggttgctggagcagtttcaggagatcaccaggaatacgactacggtgagtccggatggaacctcaagacagattccctgtcatatgataaactgtttctgtatgtattcggattatacgccgcttactttggatgagtggattctatgtgacgagaaaaggagagccgggaatgtgcggtagatattatgtggatgatgagacagccagagaaattgagaaagtggtacgggaagtagatgcaaagttgagaaaagagagaatgggtgatatttacccttctcagacagcagccgttttgacgggaaagataccgggattaaaagcagaagaaatgaactggggatttccacaatatcaaaagaaagggcttttgatcaatgccagagcagagactgtgcttgaaagaaggacctttcggaaaagtgtgctgcacagacgctgcattatacccgcaaaacatttttatgagtgggattctgggaaaaataaggtgactttcttacgagaggatgaaccggtcttatatatggctggcttttataaccgttttcaggaggaagaacgatttattattatcaccacacaggcgaacgaatctgtgaagaagattcatgaccggatgccgctgatcttggaaagacaggaattggaagactggatctatgatgataacttcctggaatttgccttgcacaaagtcccggtacagttaataaaacatcaggagtacgaacagcagagtctgttttagataagaaaagagccgtccagtgggcggctcaagtcattagtagatacatgttaataattttatagaatctgaagggatttcagatattcgcttataagcgagtggaacttttcggcttttagatactgttcttcagcatcctgcctggaagctacgaaaaaatcttcgtagtccgcatgttcccgcatttcggaagctgttctgataatttttgatgcttctttcggaaagtggccttcttttacgtggaattgattaaagtgtgcaattacgccgctatgtttgctgctatcaaagtcatccagaacattcacggcccgcattccatgaaaaatagaataatacgagcggtttagagataacttaaattttccagcatccagtaaaatcttagaattttctaattcttcagaacagcgttcaaaacgatatttggataaatcctttacgctgccggccataactgtattccctctttcttcacattcttatagaaaggcatgacattttcccattctttgaattttccgtaatctatcagaagaacagaaagaaccttatcaaattctaattctaagtcaacaacgaagtctgtcatagtgtcatgcatatcctgagtatagtcttttacaatgacagcaatatctacatcggattcggatgtttgtgttccccttgcaacagatccataaaggataatacgattgatagaaccatgaaaaatatttaatagtcctggaatcaatctttgcagcatttctgaataaatttccatctgtccgtctcctttcactatttctacttctatcttatcttatttccataacaaaatcaatctattcaggaactcatttaacgcttaaacgtatgattgacaaattccttacttatgattttgccattgtaagggaaaagtcaaaagcacagctaaaactatcaatggtaggagtttctgaatcacccagttctatatctttccataaacggctgaattgatcctgatatactggccgggaccaaaaatcttctccaatgtattttaaaatcagcgaactgctctttttagttgttgatttcataatatgttccttctttctatagaataagagtctttaatgaagcaagaagcgtttctatgttcttttcatactgttcctgaaatggcttgtctaagtcaaaatctgagtatttgtaacgcaaaaagagaagcagagcatctttcttgcgtgattccggaatccggcgcatgagatctgcgattggaattgtagagcggaagtccagattgacaaaagcctggtcttcctgtgtaaaataacgattcacaaaatttttgattttaactgtttttccctggaaatggtgtggctgttctgtgcaaaggtgataatgaaatcctgtttctataggttccgcacacaatggataagtccggcaggcccgcggttttgcgatatggatggtacagcggttgtcctttaaaaagatgcaggtatcatccggccccgtggtttttagcatgtaaataaaatagccacattcattcagaggaactggatcagcatattgatacagaatgtcatccagatattccaatgtttttccatgttcccgaaaataccttgccagccgatatgcgtccagactttctaagggaacgctctcttttacatgacggcaacaggcaccgcagccacagcatttaaactttatccactcgttcttcttgaggggacgggtatttttcagcatgtattcgtctatggtcatcatttggtccttctttctaaggtgtttttaaaaataatgcgtccgtttccagaagctgtagtttgtagatattgtcgcagcaatcttcatctggaaagtgattggattcatctggtaggataattcgcagaaccttacgtcctgtttcctcatattctttcaggctgatattgcaattctcataaatgccagaaacggtatcaccggaatggaaaacttcaccggctttcacgcgcaatcccatgatattgagtaggtaggatatttcttctggtgaaagctgaaggacaacctgaaaatcagggtggccatatttttccatgccatgtgtatgtgcattgcaggcaaagggaagaaaatgcgtttcttcctgtccgcattctggacatacgccgttggaacataagtggatgatccagtcaattttattatttttcatcatgaaatcctccttgttaaaaaggatgcagcatgactgcacccttgtcattcttggttatttttaaagttatataataaataggcaacgccttttggatggtgttcatcaaaccaatgccaaagctctgtccgggtgatgccggaaggaaaggtaatcccatgaagtgttacggaatcagcaatatattcttcaccgtttttgggtacttccatgggaatatctatgagatcttcccatatggattctacaagatgctggcatagatctgtgttatggtcataatcacaattatcttcacattctccgcagagaagaagtttgtgaccgcaggacgggcattttgtaagatagccctgcagttcaatatcccaaaggacatgaatttctgtctcacagtaaggacaccattcataaagagtttgtttcataagcacatcctttcctttttaggatagtcttccatgctatgctttaatttttcgcttgtcattcagtaactctgaagccaggtcagcaattgtccggatgacttccagtaatttctttttatttgtctggaactgttcttgaaaatcttttgttatgtcataatccagatagaggctcataagcgcagcgttccatattgcaatcatagtttcttcagaaaccttttcttcaacgattttgatgtcgccggaaagtaatattgttgtgttactccaatcgcggaaaaaagcatcttccaaaggaatatggaaactatcaaaccactctcttacggtgtgcagttcagtatcatcaccgcatcccggattggtaaagatgtacgttatgtttgacgtatcagttgttttggaaatgtcttcatcagattttatctgaaacgcacgaccaatgggaaatattgcacacacggttggttttacttcatggatagagcactttcggtcttttaaaaatacacatctcttgacgcttccacgggattttaaccgtacaataggaaggcgtgaatcatgcccaatgtaggtttcacaatattgttccaagacttcccgtggacttaactgaaagtgacgggcaatttggaatagatccttggcatttaataaaatatcatcgcgatggaggcagcattttccgcattgggtacagtggaatttaaaaggctcatctatcccgattttcatgttttcatagcatttcataagttcatttctatcgcacattatattctccttactcataaaagaaaggcgcagcagtgtgccgcacctttccattcattatagaaccatcaatcagtagcatttaggcaatcatattcagaaattcctgctctgtaagaatcttgattttgagttcctgtgcttttttcaacttgctgccggctttttcaccgcagatcagaaaatccgttttctttgacacagagctgccaggttttccaccaagtttcagaatttcgttgttgattccatctctggtaaaatgttccagtttgccagttgctactactgttttgtccttaaatgggtttccttttacgtttgtcattgtattttcctccttagatttaaaattcatttctttctgtaattctctccataagttcagattgtcctcatcagagaaccaggtatggatgttatggttcaaagtgtcaccaaagtcttccagcgcagtgaagtcataatcatcggtggctgccaattcaaattcttcaagatttgcatggaataccgtatttaagatccggcttttggtccgtccgaccataggaatgtccattgccacaagatagtgtacaaaatcggtatctctgctggcagtgatggcaccccataaacgctcaaaggatttttcgccaaatccatccaacttgataatatcttcccgatgtttgtccaggtggtaaatatcctggaaagactgaagatagccaagattcaggaaccgttccagtgttgccagggataatccttcaatattcatggcctttttacttacaaaatgctcgaatttacgaagaatctggctgtcgcaagcagggtttccacagtggacagtctctatgatcctgccatcgctggttttcctacggttaatccacgtctcagacgcgcagcaagggcatcgcggagggacaatatcggtgtaatgccctctgtcgagattttcctcaatgtgtgggataatcatattccttttggaaaccagaatacggtttcctggaaccagctccagatttttgataaaagtcagattatggagggatgcccgtgagacttcacagccgtcaatttccaccgtatcaaaaataccgactggcgcaatctccccggaacgggtaggtgtccattcgatatcccgtaagatggtctcatactgttcgtcttcaaatttataggcaaggccgtctttatagtgatgaccggtccggccgcagcttttggaatagctgagactgtcgaagatcgctacaataccgtctatcggaatctggcgtttcgatgcttcagcctgaagactgtttattgccgttgttactaattcttcagatggtgcgggtccctcaatggcgatatacgggcagatgtcaaaaccaagaggttttaagagcgaaagacgcatctgcctgctgtcgctgtaaggatcgtccgccattccttcaagcacattaaaagcagtaaaatagacacaccgttttgcacattctgccggatttaagttccggacggaacctgcagccaggttgcgggcattcttataaggtttgccgttactgtcccggagtgtatccttcagccgttcaaaatcatggatatggatgtaggattcaccggtaatgaccagccggtccttataaggaatggtaagcggcacatttcggtatgccgggatattatgggtaatgtcttctcctgtttcaccatccccgcgtgtggaagcctgaagtaacttgccgtcctcatagaccagcttggttgtcagcccgtccagcttcagcatcagcagtacaaagttccgcttgtacagtgaacacagctccgctacctgctttgtcttatccagggaaagcaggggagtggggtggttaactttcttgagactgctgaccggatagtagccaacgttttgtgtaggggaattggaaagaaccacacctgtttccatttccagttttttcagtgtatcaaacatctggtcatattctttatctgtgatggagggggcatttagattatagtaagcatgtctgtgttcattcagttcgcttaccagttctttgatttggcttatcttttctttcatatgagtctcccttcataatctcaggcgcatagaagcttctgatgttcccgtgtataaaaataagcatggtcagaaagcctctcttccggagatactgccagttcattgatttcctggatcatttgatttaagttgttggccgctgtaccagaagctcttacaatcataacttcatggatactgctgggaataatgaaatagtcttcctgcagaaagttccaaatctgatttaagattccttcatataggatgcagacggcgccctgctgtttcacaaagttagtaagaatatataattccggctggagttctgtatccagatcagaaatggtatgtccatcctcatccaggggaatattacttacaatttcggacataggaatcaattctgccggaaagatattccgtgtattttggtgtgcgtcagataagagtgcctggatatcttttttccagagttccagatgcttattccgaatcagcatagttgccatacttccatcatttctgcaatctaacagtacataaaacacaattgccagatcaaggtatggaatatgagggacatcttttaatagttcctgattcgctttcagattgacaaacttatagagaatctgtttttgatgttgtctgtagtcaaaaaggctatttacatctggtaaatcaattttggctgcatggtgtgacagttttacgatatcttccgcaattgcggcgagtggaataccatcttgaaatttttcgtaaaaagcatccaaatataagacgggcgctttgttggaagtgttatcctcaaaaataagcccatgcagctttgtgccattatttttggtagtaatagtcgggcggagactgattccgggatcaagcctgcacgccagttcttttagtaaggtttcctgaaattcctgataattcattgaaattctcccttctgttcttaaaaatttgtataattattcttgtgtgtttttttcgcccttccctcctttcttcgcttaggcacaaaaaaagagaatggacacataagcgttcattctccatcttgctgcagttctctgcaaaataaaaaagtcagaagtctatgctgatggcataggtatccttctgacaactgtacaaacctaaactgcgtgtgaaaaatcctttccggataacacaaaaataattacaagataattttaacactagatattgtggatgtcaaatgataatgaactaaatatagattttgattatggattatgaggaatgcgaatttcagataccaatttaaaaagttgagataatatatatttagcggtaaaataagttctatattggcgacattctcgcaacatttttatgatatgttaaaaagaaatatcaaaggaagtgaacatatgaagcggattttgattgtcgaagatgatacgacaatgaataaaatgctttccaatatactactggcgggaggatataaagtcacatctgcatacactgtgaaagaagcacagcactatttccaaatggggagttacgatctggcaattctggacatcaacctgccggatggttccggttatgaagtctgcaaagttatcaaagaaaagtcatcaactgccgtaatattcctgactgcaaatgatctggagcaggacatgataaagggctatgaaatgggagctgctgactatattacgaaaccattccccaacagtgttttaaggcataaggtcaaagcgattttttctatgttggaaagttccatgaatgaggcagcccataacatttatgatgacggaaggcttatgatagatttttcttctttaagagcaacgatggaagggaaagagattgtctttgcaccattagaataccgtatgttggaaacttttgtggcgaataaagggatattgttgaccaggcagaaactgttagaaaaattgtgggacagtcaggaaaactttgtggacgaacataccttgacagcagcaatcagccgtatccggggaaagatagaaaaagacggacgtaagtatatccagacggtttatggtatgggctatatgtttacaggtggaggtgcaaaatgagaaaattatctgtttcaaatattttccggatgcttgtgggtggtgcggtgttttcttttttggtgttatgtatttgtatctatggggttacccacagtctgacaggcgtgtttgtatgtgtcattacagcctgcgtcatgggcgtatgggcggctattttagtatactgcctgcaggacaaattatcgttgtttgtcagcgatatttgtgaaacgattgacaccatgacaaatggaaaggaaattacccagtttttttccgaaaaggacacattgcttgatagagtgacctttcgtttaagccgtttgtattctatgctgcagtccacaaaaaatgcgattgaggaacagaaaacagatcttcaggaaatggtctcggatatatcacaccaggtaaaaacacctacaactaatctgaaaatggcagcggcaacacttttggagagtgaattgccccgtgaccagcagatagaatatttacagtccatgaatatgcagttagataaattagactttttaatgagttctatggtaaagtcctcacgtttggaaacaggggtgattactttagagaaatgtcaggcatccgtctatgaaacattggcggcagcgttgggaagtatttttataaaagcagaagaaaaacgattagatgttacagtggattgcccggaagatatcgaggtactgcatgatgtgaaatggacgacagaggcaatctttaatattctggaaaatgctgttaagtatacgccaacaggtgggaagatacatgttgcggttatgcgatggggggattatgttaagattgatattactgattcgggcaaggggattccagaaagccgtcaggcaaccatattcaaaagattttatagagaaccggaggttcataatatcgaggggattggcataggattgtacctgacacgagagattatatccaaacaaggtggatacattcatgtggtatcatcgcccggtcagggggctacattttccattttccttccaaatcagtaaaggtggctatgccgccttttgtttttcgatattttttaaaatggcgacattcttgcgacatttgtgttttaaaatgagtctacaaaatgaaggaaggcggtctggatatggaagttttacaaacgattgcgttaaaaaaatattataagcagggaaatcatgtggtaaaagctctggatgggattgaccttaaagtaagcggcggggagtttattgctgtagttggcacatccggttccggcaaatctacgctgctccatatgatgggtggtctggataatcccacatctggaaaagtgattgtcaatggcgaggatatttctaagaagaatgaagagcagttgacgattttcagacggcggcatatagggtttgtatttcagaattataacctggtcccgatgctgaatgtgtatgaaaacatcgtactgccagtagagcttgatggaaataaagtagataaggagttcttaaatgatgtggttgctatgcttggattgtcggaacgaatggaaaatatgccgaatgaactttcaggaggacagcagcagagagtgtcgattgcccgtgcattgattacaaagcctgatataattcttgctgacgagccgacaggcaatcttgatacgaaaacaagtgaagatgtgttatccctttttaggatgaccagtgtgaagtatcaccagacgattgtgatgatcacgcataacgatgcgattgctcagatggctgacagaatcatacggatagaagatggaaaaatcaggcagtaaaggtggtggatgatatgttcatggagaacgagacaaaagaagtcattaagaaattatcgcacaaaagcgtgaaatatgataagaagaaaaatctgttctgtgtagccgcaattacagttgcagttgccatgattatgatggcaacactgacggttcagaatatcatccatcaaaatcagtcagaggctggcagcctgcatcaggggatatactttgatgtcccgcagggaacggagaaactaatcagcaatcaggagggtgtgaaaaaggttggactttcctcaaccataaaaacaatcaataaaggtgagaagaaaatgacacttttgtattatgacgccgccatgtatagtctgattgatgattttgaggggcaatatcctactgcggacaatgagattgttgtaacggattcttttattgacagccatgagtgccatctggcattaaattccagtgtatccttaaatatggatggggaagaaaaggaatatacgattgtgggaatataccatgacaaggcaaaacagatttcaaattatccaatctttgtatcctatgaaaaatgcagggaacttcgtaatagcgatttacttaacgcctatgtctggctggaagatgcggatatgttatcgaaggaggaagcaacagatattttaagagagatttctgatgcctgcagcattccgggctggacgatcagtggatattatgagtatatccatacagaactgtctgtatccaattttattgtatatggtttgatagcaggagtgttgtttctagcggcagcccttgtcatttacagtatattttatatatcagtagggaataaagttgcacagtatgggcagttgcggacgattggcgcaagcaggaaacagatttacaaagtcgtattgaaagaaggacttcttctttctgttccgggaattttacttggctgcgttattggtatgttcatcagctatttgctgcagcaggatggctggaccatatcatctttgttggtatccgtttttatttctgctttgttcggtatcctgttagtttatatcagcgttagaaaaccagctaagatagcggcttctatttcaccgatttctgcccttaaaaaccaggggacagaaactgcaatctatggaaaacataaacggcatagaattacgcctgcctatttagcaaaaataaatttcctgagaaacagaaaaaaatccattttaactgtgttatcaatgggactgtgcggtatcattttctttttggcggcaagctatcaaaattctttcaatgcagaaagtatggcaagattttgggatttcccgtatggcgaatttaagataacggcaaatcttgaagatgacacggtggatttgggcacggtattgaggaaagagtattttgacgattaccgggaagaaatagcaaagatggatggcgtggaaaatatgtattcctatttggcgatgcctgtaaattttcaggctgataaggataaggtgtctgatacaagccttcttttgggatataatgaaagtaatattgaaaatctaaatgaagcacttttagcgggggatattacagcagatacggaattgatcgtgagtgatccggatcgtgtatatgatgtctaccattggaaaccagaagtgggtgaaaacgtcaatttccagtttcataccaaagatggagaggctgtaaccagaacatttacgattggcgcattaacatccagtgctgacagaatgggcggctatattttcaggatgccggaagataagctgaatgaattggcagggtatgactgtacctatgcagttgaagtaaaagcagaaaccgataaatacgatgccattgaacagaatttgagcaggctcattgcgggaaatggggatgtttatttggatacattgaaaaatgaaacaacaattcgtcagtctgataatgcggcgggttttgtactggcatatgcgatatcgattattttaggtgtatttgccatattgaatcagattaatctcacagttacaaatctattaaatcgcagacgtgagataggcatcttgaaatcggtgggtatgacaaatcaccagttaatgaaatcttttctgattgaagggatgattatttcaggaaccgcaatccttttaaccatactcttaggcattcctggagggtattgtatcggtgagtttttgaaaaacgcaggaatggctgctggatttcagtttcctatagcagcatttagtgcttttatcgtgctgattcttttggttgaaagtgttatgacgctgatttctatcaatgcactgaagaagcaatctgtaatagaaaccatttcagcataaaagctgacatacagaagggaggtaggcggtatagtaaatgttctgatgatagaagcggagaaaagtattcttcaggaagtggtcacttttctttcaaataaagcaaagaaccaagttatggaagttggcttggatactcacttttctaatatcctcattttctctaatttggagattcatataaatgaacaaagtgtttaccgggatggtaaccagatatcaataagtcatcacgagttccttgcgttggtttatctggcgcagcatcctgggtgggtagtcactaaagcgcaaatatatgaggctgtgtatacggatgaagttgtcgaggatatagagaatagcatttactgcttgattcacagtttgcggaagaaactggagccagatccacagcatccgaagtatatccaaacagttcgaggagttggatatcggttttggcaaaagtaaagggaaaagtcgtccataggggcgacttttttgtgcataagaattttccatatattcactcttgatgttagaacgaacgttcgatataatacaagggaaggaggcgaacgtaagtttgaaaaatgtcatatttcatattgatgtaaattctgccttcctttcctgggaggcggtttatcgcctctgccatctgggtgggcgtgtagatttgcgggaggaggttgccgctgttgggggagatatggcgatgcgccatgggattatactggcaaaatccattccggcaaaaaagtaccatatccagacaggggaaagcattacggaggcattgcagaaatgtccgaagctgaaactggtgcctccgaattatgggttatatgaaaagtgttcctctgcttttatggagattttaaggcagtattctccctgtgtggagcagtattctatagatgaggcttttgtggatatgacaggaacagaaagcctatggggagagccggctgtggcagctaaccgtatccgggaccagattcgggaggaactgggatttacggtaaatgtgggagtatctgaaaataagctgcttgccaagatggccagtgattttcaaaagccggatcgtgtgcatactttatggaagcaggagatagcggagaaaatgtggcctttgccggtgtctgatctgttttttgttggcagggcaacaacaaaaaagctgtttaacatggggattcataccataggcgaactggcaaaggcagatccggcgattctaaagagccatctaaagaagcatggggaagtcatctggggatttgcgaacggtatggatgtttccatcgtccagtcagaggctcctgccaataaaggctatggaaacagcacgaccattgcctttgatgtaaccgatgcctctactgcaaagctggtattgcttgccctggcagaaacagtaggcacaagactgcgtgcggcaggagtccgggcagaggtgattgcaatcggaatcaagagttttgaattgaagtatgcaagccaccagatgacgcttaccaacgcgaccaatatcacaatagagattcaccgttgtgcctgccagctctttgacgctttatgggatgggacaccgatccggcatttagggattcataccagccggattaaggataacatggatatgcgtcagcttgatatgtttgatactacagattatgagaaactggaatgtatggatgagacggtagacaaaatccggaggcggtatggaaatgattcggttaaacggacagtctttatcggaagcaggatcgaccacatgtccggaggaatcagccgtgagaaacggagtgtggattataaaaaagtaaaggtggaataggaggggacttatatggggtttgcgattggaatggaagaagaaaagctgcaggaaaaggcagtcagcggacgatatgtaaaagtggcggtcgggtgctggtttacttcgactggaaaagcaatcccgcagatgttaaaatatgaggatgatgatgggatgcggtatctgatggaccatattcaggtactgaagacagagaaaaaatattatgcgggtattttgagtcaaaaatatgtgtgcagtgccgttgtggatgatcaagaacagaattttatcctattatatcatccgggagacaatacatgggatatggtgctgccagacagatagaaagaaggaacaaaagatgaatccatttgtggaatgtcctgtctatgaaacagaacggtttttgattaggaaattagaagaaaaggatacagaggagttatttgcttgctattctaatccggaagcagcaaagttctttaatggagattgttgtggggatgatttcttctatacggatatggaaaaatttaaaacatgtgtagcgtattggatcagccgctatgaggcacaggattttgtgagatggaccattcaggataaggaaaaacagtgtctgatcggaaccatagaagtctgtccttctctgaaatatgcggtggacggaaaggtaatgggaatcttacggattgatttaaggtcggaatatgaaaagcaggatattttagaagaattattggatgtactgctaaaatatatttatgaggattttcaagtggcgtctgtgctgatgaagatacaaaaagatgccagggaaagacaaaaattcattcagaaatatcattttgtctctgcaaaggatgaatgtaatatttctttttccgattattatgtgagctataaatgatgaatcagcaatcgagtatttttataatgtaatctcctttaagaattattaagaaagaaacagagtttttctttatattatcttgttgaaattaaattaaatatagatttttgattatcttttcatatcttcttatatgtccgcaagttcttattttatcggctttgcggacgtttttgttgtcgaaagatacttgcttatctttgcgtttcttcccatatcttcactgtcaaacgtggtaaatatcgtggtacaacttaggctatcatgcttctcaattctgccttgacgctttccgctgacgcatgggcatacaggttcagcgtgatactgatgttagagtgccccatgatgtattgtaggctcttagggttcatgttcctgtttgccagtcttgtacagaatgtatgacgcagaatatgcggtgttatctttggcaggctgtcctcatggcacttgttatacttctttgtcaaattggaaaaggtcgctgtatagtaagcatttgtcataggatagccttttccattcagaaagaggaaaccgctgtaaccgtcaatctctatcggttcggatttcttcctttctgccatgatacgctcaaatgcctgtttcacttcctcgctcatgggaacatcacgcacaccactttttgtctttggggtttctatgtagtagccagtttccttgttattaagtagctggtggttcacatggataacttcattttgaaagtcgatgtcctgacttgtcaatccgcacagctccgagatacgaagtcccgtctttaacagtatcacgattgcgtcataatgctttttatataccctgtctttgcgtacaaaggacaacagcttttcttcctgttcctctgtcaatgcctgtcgtggttttctgtcgtcctctatgacttcgttcagcttaaagtcaaaagggttctttctcacaaggtcgtccgctatggcaatgcggaatgaagcatttaacgagcgtttatgattgcttatggtctggtagccataacctttctctttcatgcgtaacgcccattccttagcgtctgaaaggcgtatgctgtcaatgctccttgctcccagtatatcttcctctaatatcctcacaagctgttttctgctctgctgtgtgcttttcttcacgtttgccctctgtgcgttctgtttggcgtaaagctggcagagcgtcatttttccgcctgtggtgtcgataccgtcctgcaagtccctttgtatctccgcttccagttcccttaatgatttcccgttcctctttcctttgggtacggggtctgtgggtacaagtttccatgagtacacatatcttgtttctccttgtgcgtccacatatttatacaagtatcttccgtctgttcgctggctctctcccgtctttaacaggcgacctttattgtcccgtcttttttctgacattgttatctgctcctttcataagaaagagcctcaatatgacttatgatgataatatcacatacaaggctctttttcattagattgtgtctattttatccagcattttttcaaactgctttttcttgatgagcaggcggtttccgttcatcatataccagttgccgaacctatcttgctgggcaagctgtcttatcttgttttgaccgactgaaaaatactgggacgcttcttctactgtcatggcgtatttctcccatactgggacttgaatatcgttcatcaaatgcccccttttacgtgcttcgtatcatactggatataggggataaggtcagtacggtctattctctgtaagtgggcggtcagcttgctggaaagggcggtgctgtatcttgccttatccagcatattttctacacgttccagtccacccagtgcgtcatgttcttccaagaagtaaaagctcttgaccgctgaaatcacgccaccctctgtgagccattgctgtgtttcttcaagggtattctgctgtttaggggtgtggagcttcaagacttccacagcccctaaaaaacgttcccaaaagcgacacgttttccacctgctcttattgctttcatttttattgggtgcgacaaagcgtaggttgtctgccagcagtccgaaagccagttctcccagttctaacggtctgtccttgaacgtcatggcaaaggcatgagctttgtcgtcacgcagttgcatttccgttcgtttccagctcccgacttcatcaagcgtcctgttgtactttgtgcagacttccttatccttgtcataaaggcggtaggacaagcccgattttccagcaccgatatagactgtctttgcggtgtcgaaatcatcaaacttgctttcgtcaaacttataaccctcactgtttgagataaattcctctttttcgcatttcttctttatctgctctatggtaaagaatggcttttcgttcttatcatcaatggcaacatcaagccttgtgaaatggaaattgcctagtccgtatcgtctttcacatcgtccgaacatatctccaaaagtcaagcctttatcttcaaggatacggtaaatatcatcacagcccctgcctgtcataacgagataacagtcaagtccctgtgggttgtcctctgtctttcttgcatcacccgatacataaatatccccaatctcccagcgtgtctgataggtcttgaattttacagtagctggatagacattgaagatgtccgttggcaaatgtaaaatgtacttgataacatcttcagcggttgccgtttcaaatacaatgctgatgtaatcaatcttaatggataaattttcgtgtgttgcgatagtgcatttctcctttcgttcttcccgattttttgcggggtaaaaatagtgttttgtcctttatttatcacagttttttaggtactatgacatgtatacgcagggcggtgttacatatacgccctctaggaacgccgaaaggcgttccctttccaaaaggaactgtctgtccgaaacacgtctggggggcgtgccccgtccagccagccccttttggaaaccacgattttcagtccgatagtccatgcttattcatgctatcaaagtgaaaatatcttctctatatgcttactcaagcgtgtgattgaccctagcgtgcttaatcactctatctgatatgataataacgccagcagaattacttgtcaagaaccttatcttgatttttcggaagataataagtataataggcttatactacacatgaaaggagaagatatgccatgaattataagcatttgggacagaatatacagaccgtcagaaaactaaagagaatgaaacaacaggaacttgcagacgctatcggtatcaatttacagagtttatccaagattgaacgaggggtaaattatcccacttttgaaaccttagaaaagataatggctgtgctggaagttgcacccaatgaaatgttgtcaggagaatggaagtatcacacccatatcgaaaaagaagtgtgccagttcttgaaagaggaagaacggctgaatgctgaattaaagcatggacattatgataacttctttgacagtgaggacgaatggcttgattatgagttagaacaattacggaaatacattacagactatatcaatgacgaggacattcaagcgtccgacctttacccaatcaaagagtttgttcagcacttgaagtttcagaagattttagaccgctatgatgaattttacagccttgatatgttcggggaaagcacagaaggacacaagaacataaatccatactacgccataagaaaggtgtacgagggttacaattatgactatatagaaggtaggaaaatcttatcacaaatgccatgtatcgaagaatttgaagattttgatgatgaggacgagtaacctttttcctcttgtgaggagataccgcaaacaaaaagcccagtaaagagtgcaacgcaccacctatggtggcaaggctcttgacagggctttttctttactgtcttgaggtaatcaagaggaataaagggatagtatgttgaagtgtttacaacagacggggggactgtcaaagcgagcatgtccgtgaagattattgacagtcagacaaaggcaacacaaatttcacagtttgagtttgtgttaaataaggatagcaactggaagattatagaataaatgacagaagcgtgcatttctaatatttgatttgcactctttcttttattatttatgttttgtttatttcgaattggagtgatataatattacctgatttagattggttttaaataatggtctaaaaggagaaacgactatgagcatgaaaacacaacgattattgggtatactctctgttcttaccaatactaaaaaggttactgtattagaattggctgaaaaatttgaagtttctaagagaacgatttttcgagatttagatacattactttgtgcaggttttccaatcgtatcacattctggtattggtggtggaatatccattatggaagagtacaaaataaatacaaatattttatcatttgcggacactgaaaaaatatatactgcattaaatgctttaaatagtattgaaaaagacgaagcaattacaaatttaattgctaaacttgttcctgcaccagaaaaggacattttcactaaaagtcaatacgttattaatctatcctcttggttttatgatgaatttacttatgaaaaagcaactactttacatcaagcaattagtaagcaatgttgtgtaaaaatagaatattgttctaataaaggtcgtactgttaggactatagaaccacataaattggtttttaaaagttcattatggtatctttacgcctattgtcaaaagcgaaaaagttttcgtatgtttaggcttaaccgcattgtttcttttgaaataacagatattaaatttcagaagcgcccaacggatataattaaatttgacacaaaatatggggagaatttattctctaaagaatatcgagaaggatatatcaaagttgtgcttgagtatgacccaaaagacgaattttcgatatcatcaaaaattgatgcttctttctttcatagaatagaagattcttctgataaatcacaaatacagttttatacatcagatttaacatgggcaaatgaacttgtatttagtcttcttgataaggttaaagttatatctccctctgaattacgtgatacaattagcacaaaactaaatgaaataaatttattttacaaagggtgacacagagttgtcatcttttttgttatataatgtacttcacataggaggaaaattaaatgaaaaaagtagtattagtttttatctttgatggatatgctgattgggagccggcttatgtctgtgctgaattaaactcaccacatacacagtatgtcgtaaaaacaataggtttaactaaagaacctattatatctatgggtgggttccagatagtgcctaattatgcaattagtgattatccaaaagagtttagtatgttaatcttaaccggtggatttgcatggctacaacaaaaaaacaatgagattttacccattgttgagtatgcggtaaaaaatcatattccagtgggtgcaatatgtaatgcaacaaattttatggctgaacatggttatctaaaccagataaaacattctggaaataccttaaaatttatgaaatctcaagctccacattatgcaggagaaaagcactttacacagagacaagctgtttgcgacgggaatataatcacggcaaatggttctggtgcattggaatttgctaaggaaattttactattattaaatgcgaaaacagaaagtgatatatccaaatggtatcttgaaaataagaggggtatgtttccgtattaaagaataatttcaagccaaatggaaatagtgtagtttttattactattattgctgttagataaggtggtggttttgcgggggaaatattagttgccgaatttgcagaaaatgaagaagctatttttcaacaaactgttaaatggttatcttctaagctaaccagtgttcctacttttatcgaacaacctattgttggatttcaaatagacccctttactagaacctatacttctgaaagcggtgaaaacgtatatctgactgctaaagaatttgacttactctattttctcttttgctataaggggcaggtatttacgaaagaccaactatatgaaaatgtctggggctttcacaatgccccagagggaagcaaccttacatcattcatacagaagctaagaaagaaaatagagccgtccccagacaatccgcagtacatactaactgtctggggtgttggctataaattcaacgaagaaaaaccgtagattgtaattcacagtatttgatttacagctacggttttatcatcatatcaaggctcattcaatcgtggtaaattcgtggtaaaatgagtgtttttcagttatgaaactgtttataaatgcagtatttatgctgataattcaaaaccttattatataattatgataaaataaaaaacgaggagggaatgggatgcgaaaagtttcatttatgcttatgatgtttagctccatattgttattgacagcttgtaataaggtaaattttaatgggagcagaacgggaaatgaaagcgaatttataatgaagtacagtattttaaatggtacggattcccaggctttagaattggaagaaggggattttattgacgctgaggttgtcatagattctgggaaattgtctataaatattcagaagggtgaagatgatccaatttatgatagtgaaaacatatccgtttccaacaactttcaagtgggtattgaagaaagtggaacttatacaatcactgtaactggagagaaggcaaaaggtagtgtgagttttgtgaaaaatgataacgagccgtccaaatagattgggcggctcgaagtattttgcacattaaacacaggatttttccttttgttcttcaaaatagcggtctgcaatatacccggcagattctgcccatagagtgttttctgtgttttgcagagctttataagttttggaatgataaaacgcaactgttgcatctgaaaaattcattcccgtagtttctttgatgatatctatgacatcgcggatttgaatacaaatgttcatagtaatatcttttccgtgaaagaaatacttgccatcagccatgatgaacctcctttcggcactcgaattttaattgttttaaagcaagaggcgtatggaaggaaacttgattgttcactttactatatcgtaatctttctacagcttcctcagcttttaaaataccagacatgtaaagctggaccgtctccatcgtgttatcatcagcaaccggacctattacgacatcgtatggatgctggataccaccttttacccgattatttttaataaattccaaccattctgcatccagtgaatgaaagtgttttatttttaaatcatctgtttgatgaaaaatgtattgatatacatattctccgccggataagtttcgcatatacaggcggtgtgcccattcacttgcctgattttccaggattgtacaatagaaccctcgtccaaaatccctgcggttatgcgattttgataaatcaatttgatcgaagacgatgttggaaccatgatataagatcagcgtggatgactcttttgagatggtttcttcaatgaagtcaagtgtctcacaaaaatctaactgatgcaaatattcatgttgcaatattagtttttcaaatatttggtgcttgtgaaataaatcaacagcagcacttcctgatagatgatgagttttagcataatcttccaatgcccggatagacatcatctccacatcagattggatactcataattagctacctccgtattataaacctattataacagaatctaaacattcatccaataggaataataggcagatcaaacgactaatttctcggcatttcgataggcttcatcataagtgttccattttaactggttgccgtttcgaacctgcatatctccgacgaaggcgtagtaatggcagccgccgtcaaattgctttatgcggatgtcgctttttttgaaatctgggaaaaccaggtttttgcgtctgcaaaattgtgtataatccaggtgaaatgtatgtcctccagcgggattgatatagacggcaccgtattccctgattgtacggagctgattcatgccgatttccatgttcagccatcgaaacccatcaaagatatttccatttccgttccgggcctgtatgacagccgcctgaagatatttaaagttccggtcattcattttggcaatccgttcttccaaagagagattttccagaatcttatccggggaaccatcctgaagatacatggcaaatgcatcttcgtaacgtccgtctttcattttttcatggtagtcggttaacttttctacactatctattttgagccaccagccaccgtcagcatatacaaatacatattccatattatcgtcctttcgtgtattttagaaaaagagccgtccaagtgaacggctcaggcattatggttgctatttctgggaatgaatgtaattaccgttaatatcataatctctggttaatagtaatttgtcgcggaaagcgttcagtttttgacgaaagcgttttccttcttctatggttgtcagcatagtgagagcatctatcaggccgtcaatatggccttcgatacgataatagcgataagggttttcttcagcagaaatcaaagagagtgtttcctataatcgattctgcttttctcttagccattcattccaaatatcaagttctaaatcggtcataagtgtatccctccatttattcctgatccaaatcctgatttagaaactggataaattcctgcacctcggaggtatttaattgtatatgtcccggtagatgatgaagtgcccgaaattcatcctgcttctgatcaatccaaaggatatagtcaactgcaatgtagtagtctcccagtgttaatcctttatgttgaaaataagataacaggtaaggattctccggcatagatttaatcagagttttttgcgcgttattttcctcatctataagggatgccgagtcagcagcaggaagcggaacctccagctctgtgatagaccattcaatccaatcctcatgaatcactgctctggcactgtatccctcaagataagtgttttccttttcgtcctcctgctggatgataccctgtagtgccatatgataactgtcgaccattcgtttaaatattgtttcataatctgtttcaacgataggatcattgagagcaccatcgtaacagcataagataaaaatcttcatttgaggttcctcctttaagcaacttgattttctggtttgtatggatcttcaaacgcatggatatagatatctgaatcctccagtatggatgccaggtcttctaaagagtccgcctcataaccaagatcatgaaaacgcatgagtaaggcttcagaagatacaaaaggctgtccatattctagtttgtcaccaatacgtattccagaaggcgttatcaaatcttcattatccatgctgatgcagtatctgtccggaaagtagattccggtatggtccgtgttgatataaagattgctgccaggttcggtgctttgcatcacaaagtttacgccataaacatcagctatgactgtataggcatcaaacagtggcgaccatgcagcagaggtactcaacaggatattatcttcattccattccatatattcgatagtacctcggagaccaatatttgttgtatcaatccccttgtagttgaataaattttctattgctgctttatccacgttggtatgcagaacaatagatgtttccaaatcttcccaaagagagcgcagtccatcgggatttgtctcagaaaagaagtagacgtcatcacagcatacatttgccattattcctccacctccagtcctattgatttttcataaccgggaacagaaagaacgtaatcgcagctctttaatttcggatcattctgtaattctttgtaggctgtatcacgctgctcactgtcagcataattcttatccaattccgtaatctcaatccggatgttaggattagatgaaaaggcagcgctgatgattccgtcctcaatgacgatagccacccgtggatcttcctgtactgatgagagcacaagccttccatcggctatttgctgttcgatttcctcgatgaccgcatccaatgtgtcattgtacgcaatattgcagtcttctttttcctcgtaaatgcgataggcggtatctaaaagctccgcctcatccgggagtgtttcatagggaaggttgcataatccgatttcttcctgtctgcggtcagaacatcggttgatgaaatcgcaggaaaagcagtgcatttgatagatggcatgtgcctttcttatctgatcataaaataatgtgaatgataaactcatgtgcgtttcggtattttctaatttcatatgacattctccatttctgccggttcttgtccggctggttcttcttttggtttgatgtagatcaggaattttccccgaaggtcaatatcctgctctgtccagtggtcattgatgtaaacctttttggttaaggtattgtagattaccggttctttccggatatccatccagtctgccagcaggcaggtctcctggtcgatataaggccatagtgcatcctcaatcatctcgcgaagctctaacgccagttggtgaagctgtgtggtactgtacgttttggacatacaggaactcatctttttcttcattccggagtccgcaatcgtctggttgatagccgcaatctgttcttccacagagacattgggattgaggatcaggtgatcggtgagaatcgcttttacaaattgggaagctgtttcattcacctgtgccaccaatttctcatagggttgtttgtagtaagatttcaggatatctaaaggaacattatcccgattctttttgagggtggaaagcagcttttccaggctgctttccagttcatagatatttgtcaagcacacatcacctcattctcattgggaaccggcatgtaactaagccggtatgtggtattacaggtccgaaagactacgccgtatgaggagacttctaaaatctctttcaccggagaggtcagaacagactgccggttgccttgtaggattaaggcccgctcgccaacacgcagcggcagggacagggtgcctgtcaatgttgtttccttctgagacatgggactgattctttttactttttgattcgtcatagtaatcacactcctttattagatgaaatttgtttaagctacttcgtaatttaatcggaaccatccgcgtgcaacagggatatactggtctttatgctcgtatatcgttgcacggatacgctcctggtaatgtgggttatttagcgctttgggatgatctctcaaccgttcatataaatcggataaggctgcggtaccgccaacgctttccatggtcatccgtatcagatgatgccaggtcagagcctttaaatccgtgctttgcagggaaaaccaaccctcctgacgacagctaaacggcacaatcagagaatctgctttttttaagatgagcaggtattctgtgaccactggaatgaatggttttttataccgccggttgtccgaaacacaatgaaactggcctttgacgataaaagattcaaagtcacccatccgcatcaggtcatgctgcatactgtagaactttccgttgcttcttatatctcccacaaggacagcaagcctgccgtctttgcgcagagataaaaagaatttacggatgcagtaattcagtttctctaaaaaatcctggtagttctcacattgggataaatcgtccgggtgaggtttgtttccccacatgctgccgctgtatctgatgatattgtggtagggtggatgaaagaagatcagatctgccgaatcgtccacatcgtcttttagagcgttccagttcccacggccataagcaggagcaggattcaggtcgtataaaagtgaacggacctgatagcgttctgctacggcttgggatgtcccggaaccactcattgggtccataagggtaaactggctggtatcttttccatagtagcgtttgctgtccagaacatagcggaggacggaagcaaccacctctggggagcagttgccccgccagtggttattgccgccatttccccgttcagggaatgccataaaagatgtcaattctttgccaacacgttttcgcagtccttcggttccgagcattccggcaatggattgccattccgttccaaattcttgctgtaaaagctgtgcggcacgttggatttgtagttcattcatcatatacctccctttactgctttctcctttgcttttttaccgtgtttctgccagtgtcatatggcggagtctccggcgcattctggttacgcgggaggaaacccctttgatggtgagattgcaggtctctgcaatttcctggtaggtatagccatccgccctcatataaaccacctctttttcctttggtgtgaggtaggaaagcagtttgccaagctgtttctggttatctaatgtttctgccatgtggtttattctgtttggaagaaattcgtctagggatgccgatgcgtaattttcatggtaggtccccataagtacattccgttttggacgattctggtagatgagttcctcgactatgctgtgcttcatctgtctccatgcaatcgtggaaaattggtatttcgataattccggtttggcaaggtaatcctgtacggcatggagatagccgaaaataaccacatcatagaaatctgcttcatccagttgattccttgaaagaaagcgttctaccagatcatgatgcttttctgcaaatgttttttcttctgaggttaataattgtattttcatagagtttctcctttttcttacataaacttgtgagccaatgttgtggccactaacttcgcgcttccaagttccatctctgataaaggcttcccatgcttacaaagcaataccaatgcaaggggatagtcttcctgattgggaattggaaacagtgcagttacaggttctttgatatgcggaaggatgtatattggatcgtccagattaaaaatggtttcctgtccggcttctacataggtagatagttcttctggtatgagagagccatctggaagatagaccccttttgccatgcagacggcttctgtattacagatgaaagctccgtgttttacgacttcataaagaatcgtcagaaatgtttggagctgtttgctgtatggcatagccgcattacatttgcgtaagaggatatcctgtccattgcttatgatttccagagagtctccgcctgtgatattcaggcgtttccgaatatcgcagggaatgatgatccgcccctggttgtcaatattgcgaatatttataaattccataagtttctccttcttttaaaagaaaagaagcagccaaacggccgcttcctttcaaaaaacttgtgtattatgcagcatagggattcccctgtgctggatatgatacttgtccattctgataagtattttgatattgtgcctgattctgtgcctggcgttgagccagttggtctgcatacatctgctttccattttggatcaatgacggagcaatgcaggcttcccaatttgtgatataggagtcagcccgttttaggagcatataaagatctatatctaataattggataaaagcatttttctgaagaataaaactatcttttttcatataggaaccgcctttttgattctgcattttgatgcccttcccgttggcgatgtagatacgccagggattttttagtatttttccgtcggatgcctgaacatgcctggaaattgaaaattgctgtacagtagaatatccttgctcatccggattgccgaatattttactctgtgtccattcaaattcctgaaaacccgctgtgatacgagttaaaaagaactgaatttgttccggagtcagattgaactgagtgatgatattcttatctccagtgccgtttgaatagtcctggattgtaactccaatcagggaatgtactttacgttcattttcggagtattcccctttggcatgaagctgtgcgtaattggcaaatgttgcataccgcaggcggtcatataaggcaatgagctttttgtcggtctgtatcttgcaaatttgatcagaaatctgcgattgataattctgattcataatcaaatgtcccttctttctatttgagatattgttttaccaaaagtgccatatttttcggcagtttctccagatccgtaatatctaagaatccttccttgtagatccgcttgatattttccttatctgagccgatagcggcagcgaataggatgatgcccttcttttcgtattcccttttgattccacgcaggtctgcttccgcctctgtaccatagtagccgtaagcagccggttgcccatcggaaatgatgattagcagtttttgaagctctggacgtttatccaggtgttctgctacaaatcgaagggctgcaccgtcacggtttccgcctctggcactcatatccataagacgatagcggtctgagctgccaacggaatcgaactctgcataagagaaaagttctacacctgatccactggttgaatggccatagattgtaatgggaattcccagagaacggcagaaatcatagagaacaattgctgttttctttgcatgggtaatacggtcagcgtctgccatagagccgctttcgtctaccaaaagcgcaaccgctaatttttgttcatctgaaggaagtcgggttcgggtaaagaatgtgccgtcctcgtgatggagcgcgcgcatatctaaacgtttgccaaactgcaggtttttcattttgccgccttcactatcttcttttaacagcggagcaatggttttctgcaatcgcctggaagcctgtagaagcggcggagcaatcctctgatattctttgatcacagagtcaggaacataggacatacggttgatattgacatggacacctgcatgggcgttcccatagtgaatatcgtttgctgcttcctggagttcttcagacaattcttcctgatactgggtttctgctttctttgtggcaacttgattcaggatacggaacaagtccgatgctgctttttcatatccggaaccggaatactgatagttgtaggtgataccgggattattctcatccaggatggtattggttttcaccagagccatccggttcccgtcctctgctacaacttcctgcatctgatccataacggcccgccgttcttctggcaacagaggcggaaggggagaagttttctgttcttttttccctgcctctgcctgtttgggcattttcccgccattgccggacggcagaggtgtgcccccctgaatctggtcatcaagaagttcagccagattctgttctgccgtttcctcatcttctttttccaactgctcctttgtttcttcaatcaggggtttgatatattcccacagaagaacgaggatatgattggtggcatgaaaccgatccttaatgtcatcggagtagatggaattttcaatataaggaacacaatcttccagacagtccaaataaggacctgagtaattggtaagattgctgattgttccataacggcaatactgaaggattagattggtcatgatagaaaattcttcatagttctgatcgatttgttcctgaatggaaattgcctgctccatcattctaaggtggttaagctgaatgccttgcttaaaagtgccgggatgtgaatgacacattctggcttcaatgtagatgtcctctaaaatattgctgatcttagacgcacacctggtaagcgtcaggcaggcagccgtatccttctgatccaccgcctccagaagttcttcctgatgtgtctgatatgcaggttcggatacggagggcgggtttggataaaggaaaccatgattcatgctgcttagatataatccaagggtggtaaaatctgtatacagcagatgtccaatttcatgtccattaaaccctgtgaggctttccgaacgcagaacacgtgtgggaaagctctgggttataggatttgctgcattgatatggattttgtaattatttgtataggcagctccgcttttgggggattcatcccaatccatgagagtctgcagtccctgacgatagcggccggttgctgctttggccagggacgtttgatatttctggtaagcagatgattggaaaagttcctgatctgtaatagatagttcctgatctcttatcatctgccgtaattttttctgatcgctgttcaagattaatccttcctttcttcatgcagattttttgtcagcagttcctccaaggtgcaatgaaaataagatgcaatacaataagcgtcgtatgcggatggagaagtgcatccggattcataattcataatagtttttctggaaacatgcaggatacgtgccagggtcttttgcgaaaggtgccattcccgtgatttccgcagatagcggagattggttgcaaagagaaatctcatttgatcttcggtgactgctgattttcgcatggcattcccttacgcggcaaggacagaagtgatacagctattttctacctcaatccgactcgcggaatccgcagaaacggaagaaagtatcgtatagtgtgccgcttctatgatgtccccgcataccatgtaggactgtacccaggaaatcagttctctgacgccgcagcagccatcagtaatcaggttttccctgcaaaattcagagatggattttacaatacgtgccatatcctgaaccattttcttgtccgtacagccagtaatgccaagcacgcgctgtaccagagtttcttcatccggttcttccaggtcaatgattaagctcatgcgggagagaacagactgattcatctgcttacagccggcatagtcattgttggttgtcactacaatcatggtatctggatgccggtttacaatttccccatttggcagaaacacactgttgcagcggtccaaaagggaatttaatccaaccagaacgccaggatttgcaattaccgtgggctcctgaatttctatcaagtacccatagcggattgcttctaccaaaggggtatccacgtatttaaactgctgatgcgaggtcttgcttgcatagtggtcacgcatttcattaaaaatcgtatcaatgagtttctggtaaaccgtctcctcagatacgtcttcatcataagtgttggtgagcttttgataggcagttgccgggtccagcatgatatcctgaaaagttggatattccctttgcagagtagataacgttccgtccacatctggaaggatctggccgagcaagtcgaatatctccgtattggcagagcaggtgatacaacggtaaggcaggtgaagtccggaagcaatcgctttggcaccttctgtctttccggttcctgcaggtcctcgaaggaggaaattgcgcatgggctgaaccgtattggtcgttaatttggcatgttcacagatccgtttgacctccggtggaataatgtaccagtctgggagtgtcggaacagtaagttcttcttctggagtgagtgtccgggattcggacagaatgtatttgctgacgaaatcattttttgaaatggtacttcttgatttgcgggaagcagcaccaggcttgatgacctgaaaacttccggcaatcacgttagttggagaataagttcccttttgaacactaaatggtttcagggaaggaacgattccgttttttggaatctcgtttcgcagtgctgccgaagatagggtatcactgtagcggattcttcggtacaggttgtcacataagacagccgccgtctttgcggtttcttctttatcggaatagccatcatctcggtgctgctttagctgctgatagtattcgttaaactcatcatcttttaaggcagttgggagcagtgcaaaaagaagtgcggctccgctatttccgttttcctgtaacacatatttctctggttcctgttcttcatctgccggagtcgtatagcgtccagcataaaactgtcctttcagccggttataaacaacaacatgcagttcaccggtcttgcttggatattctgctatggtgaagtcattaccctggcttccaatcgcaccgagttcttctgctggcgtactccctgtgggagcttccagctccatgtaggcaaggatggcgcgcagcatcgccgcgtgtaatgtcgagcgtttttgtggctgattgcaatgtatggaacaaatgttcttaaatacgggatcatcggtgtaatcctcaaatggttccggcaatttacgcctaaaagtccagttatccactaattttccatttggcatgtttgtatccctcctttatgcgttccacgataattccagctcatgctccagttcctttgctgctaattcatccttgataaagatgtcagcaagggcgggccagtaactttttggtgggaagtgttcaaatgtccctttgatttccggtgtttctccgttacggatgaaaatttcaccagtttcgctgataaaaagtttctgatgacctcttgcctgaagatctccgatcagttccacaagaatcggctttccaatcagggtataccaggactgtggatttgcctgcttagattctgtgtcagagccttcagaggagcggctttttaaagattcaatcgttaatagttccagagccagatatccatactgatctaaatgaaattcggcaaagttgtaagtgccggtattttgagtacggattcttatggtattgctattcaaaagatcattgagctttggacgatttacaaattcccaagttgctttttggaaaggcagctttgagtttgtccgtaatctggtaactgatctgccgccagagcaatacttcagaatctgagaactgcttctcatccgatgatttgggaattttcgtgagcttttttacctgtcgcaaccggatacggggcagtgatgggaggataaggagcagaagtgatcctaaaatcccagtgatcgctacgcctgcgataacaatccggttggtattttccggggtaaaaagaagggctgcaaataaaacagccgctacaacttttaaaaatgtcatgctctttttctcttttctttttgttttcatggaaatgatcctttctgatttgtctttgattcttcacataaaaagaggaattgcagatattcctgtttgaataagtgcaattcctcaacctataggttccttgattttagttaaatggaagctgaccggcctggtattccggtacattggaaaaaccatcgttggaataaccgctagcaggtacgccgccatatgtctgcggtgcagttcctcctggagcagcatagtttctgtttcctgcataggtagcgggagatgtctgcggtgcgggaggcgctgctgtatatccacctgctggtacgccggctcccatatttggagcagcatttggtgcgccagcggcacccggataggttcctccatttggtacgcctggattctggtatccgccaccctgcataggtgcgccgccattatttggcattgcatttccattcataccgggagcagcaccagattcattttctggtttatttgcaagacagaattgccagtccttaacattgactttggcattaactccagcttggccagctttttgcccctgctgatagataaatggatggatttctaaatctccatatacatacagacaggttccctttttgacatttgctttcagaagacggtctgccagatgcttgttaaaaaagcactgataatacatggtttccgtgttctgcccattctgagaattttgactccgctgtgttaccgcaagatcgagactgatgtattctgtcccattgtttttaccttgctgcatgacgggatcttttgttacccttcccatgagatgtgtgattactgacataaaaattctcctttctgcctctttgggcgttaaaaaaataataaaatggtaaaagaataggaaacctgtattacagatttcccataaataaaaaaagagccattaagtgaccgcataatacggctatcctaatgactctaatttccaaacttaaacttcgtgtgtcctggatgaatggtccagactccctaacgggataacacaaaaactcaaatacaagattataatagcacaatatatagaaaaggtcaaacaaaataaaacaatatatagtgttttggcgaaaataaattggagatattcagagaaaagtgagcctaaatgatgcgtcatatccatatgattgtttcttattaggagtgctgtaaatacaaggcttttcgaagcctaccaactctaaaaaaaatatttgatctatcacattacgcaaaagccgcccggctgagacttcgggcggcttttttgcgtggatagacggaaggagggcgaaaaaataattacagaaatttcctctcgtttacgtttgatttcacggcctagggcatgaaaattaaggtttttgtcatattggtacattctcatatcatcctatattgttttacatttcgggtgacgttatgagatcgaaatgaattattacttgtagtagtattttgttttgcatcgcattaaaagcataattgttgcaaagtaaaagtggagctataataataaaaacaagttgacattccagcgcacaggaagagttaaaatgcaattaagggggtagccaaatgaaatctacatggaataatatattggagaagtatattcataatttagtaagtcccgatggacgaaacacttttgagagtacgcccgaactcgtcaaggttattttgcaaaaagctaagattacttcaagcgacactgttatagatattggttgtggatggggaaatcttacgcgagaaatagccgcttattcagcacatactattggaattgagcctaatttgaataatcttaacgtagcaaaaagtttcagaacggcagagcccatagaatatttgcaaggtgcatttgagaatctaaactgttctcgaaaaatagatgtagcagtaagttctctggtgtttcatcaagtaaaatattgtaagaaaatgatagcattaaaaaatgtaaaaaatgcgcttaataaaaacggcagatttgttttatgcgatacaatgattttatttgatgcaaaagatgagccggaattttttgatatggtatatcggtatcttttggaaaaaactactcctactgatatttataatcatcatattgctccatatttacaaaaaaatcatacttatacatgggatgacatgaaaaaatatacaccaaaagataattggttttactctttagcggaattaaatgaatggttagctgagtgttctttagtaatagttgataaatttgaattatgcccttttttcggaattattaccattgagcattccaagtgagtgtggcagttaatagtttttattaagtgttgtattaagttaggaggtggtcacgatttataagataggtgagttttcaaaaattgtagggataacaactaagactcttagatactatgataacgaaggtattttaactccttcttgtcgcaatcaggcaaacggataccgtctctattcatcggatgatattaaaaaagcagaaatcattgcagatatgagaaaattcggatttacaatttccgaaatgaaagacacgttaaggaatatcaaaaaccgcgatgatttcattgattacttagaggaaaaggtagttataacaagagggttgattgaacaccatcaaaaactgattagtgaaattcaattatatttgaaaaatcatgcagtaacgcatacggctatattaagtccagcgcttattgttacagaaactgaattgccatctataaacgtagcaagtatccgttttcaaggtcaataccatgaaatcgggatctattttgaaaaactgtataggatcattcaaaataaaaccgatggccccccaattacttgttaccattcgttagaattttgtgaagtggctgatattgaagtttgcgtacctatatcggaaagaattaaatcctctgaggtcattacaagaaaaataccttgtagcagggccttatgtataaaatacataggcgaatatggtggattaaaatttgcatatagagctttatttgattatgccaatacaaataatttgacatgttgctctccgataatcgaaatatatcaaaaaggttatggtacaacaatggctggaaatcctgcaagatatgaaacagatatatatttacctctaatataattatgctttgactatcactttctaaagccgaagccgccaacggcatataaaaaaacgttgtcttggcggctgccttattacgcgccaaactaaaatacagtagccttacggcggttttgaaataacaaatttcaagccgccgttttcttttcaaaaaatgagaatacggaggggtgctaaagtaatccgtactgcttttgcattggtggtgtcggcgttcaaattgaattttcagagaatgggccatccctgcaggacactttaacggactatttgatccggcggaaaagcgggctgtaacttaggctgcggccgccccacttcgagacaaagtgtcctgagacggagccatccttgttgtccctatggaaagagttatgatataagtgtaatgtgataaggaaggaggaacaatgtcacgaacaaaaaacagagggtttcagcagagtttctctccctcttatatcatccggcgctggcggctggggaaatatatccggctatccaaagaggacttgaaaaagggcaaggacgatagcaacagtgtaaaaaaacagcacgatctgctcaatgacttttaccacaaacacatagacgaatttgagagcacttccgaatatgtggacgatgggcacacgggaacggacgccaaccgcgagaatttccagcggctcctggccgatgtaatgagcggaaaaatcaactgcgttgtggtaaaagacctttcccgtttcgcccggaattacagcgatgcgggaagtctgattgataacctgtttgtgcagatgggcgtccgctttatcagccttgcggaaaatgtgtacagcgtttccagcattatcgtccccattacgaatgtaatgaacgatcaatactgttatcagacttcaaagaaaatccgccaggtatttgattacaagcggcgcaacggccagtatatcggctcctttgccccctacggctatataaaagatcccaaagacaagcatcagttgattgtcgatcccgaggcctccgagattgtaaagctcatttataacatgactttgcaaggggaaacaagacgggccatcgtctaccacttgaataaccacggcatcatcagcccgacaacctatcggaaaaacaaaggtctgccatattcctgctctgtatctgacaatcccatgtggggagatcgggtgctgaaaaacattctcacaaatccgatttataccggggatttagtctagggctgccgccgtgtaaaaagctacaaggtacatgagattgaggcggtgccggaggaagaatgggtacgggtagctgatacccacgaggcaatcatagaccgggaaacctttgataaggtgcaggccctattgaaacgggacacccggacggccccacggaaaacggagctccatctgttcagcggctttctccgctgtgcggactgcggaaaatccataacgcggagccagagcgggaaaaatgtatattatgcctgctctacttacaaataccgctctcgggccgcctgctccatgcactcaatcaagcatgagcggctggaggccgccgtcctgtttggtattcagtcccaggtgcatttggtcgtttactattccgaggcgattgcccgcatcaattcggcccctatcaaaaaaagccagtctttccgactggacgatctgattaccgcaaaggaacgggaactggcgaaaattacccgctataaacagtccctttatcaagactgggaaattcccagcaggactaccggaacatgaaagccgactatgaacggcaggccgccaccctttccgatgtgctggaacttctgacaacggaaagggcagaagaggcaaacggtgttgacaatgaacatccagcgctggtggcatttatgaaatatcagaacatcgaaacgctcaaccgggaaatcctcattaagcttgtggatcacataaaggtctacgaaaacggcaatatcaagattaaattcaagtttgctgacaagctccgcaagattgtcgagtacattgaaattaacacttctgaaattcccgccgtagcgggctaagtcccgctacatcctttctggcagtgtgttttcctaatatgaaacattcataggaaaggggtgcagatccaggaataaagtcttcaaagaggaactataatgtctaggtggtggaactgtcatatcctgtgcaaataaagggagctttgatagaatggatggcaggaggtcaaagagcatgaaagaatatatatcgaaaatggaactggaacattgtatgcaggtaaaagcgatttttcagaagttatcagagaacaacgatttttgcgttgtagacgcgtatccctttggatgtgtagtccttgagtggttcatgccggagaggggatttgaccagcaggtatattttacggatgcttccgagttgtttgattatcttttggagttatgggaaaagatttatctgtttgaaatggaaaaaatctatgggaatacggaaatgggtgaggaggaggttcggaaaattcttccggatgaacggaagaaagagatggcagatatccgtaagaattacatcatgcaatatgagcagcgcagtgtaaattggtaacaggcagaaaaagagtcatggattctttcttagaacggaaagaaccaagactctttatgttactcaaaatagtgttcgtcaatcagtttttgaagactagtagcagtgactaattcctcaaaggcatctttatcttggtgtaaattcataaatcaagcctccttcaatgagtttctttgcggtagttccggtaaccgtcggcagaatctcgactaactgcgtttgggaaaattctttttcgcggatatagtttctgaaaagagccagagcatccgttttctccaattcggcatatctatccatttgaccaattgcgtctattacttgcaaaagatctgcattttcctgtgtaacggtgatcgcagggcgcttcagtcgaatggactgtccgccaatagtaaccatacggcctttggtggattctttatttgtcacgatttccataacggcaggcatctgggtagtcagcccgatctggtttgcaaaggaagcaccggtaaagtacccgaaagtagaagtgtcatttttgatatatttgcggataatgacctttaaagggtccatatacgttttgcttaacaatcgagaggattttggaaggtagtagatgcctgtatcaaaccggaccaggtcaccggattttaccatgcgtttaaaatactgacgcagggaattgtcattcatattttcaagttggatatcactgataaaaataggttcgttatatccataggttctttccagatattcttttaacatagtttcatccactcctttcacctccataatactatatttatactaagatagtcaataaatatgtcatttatattatggacagaatatctggaaatatttcctgttacataaataataggttcaaaatagaagtgtttgtatcagaagactacttttgctctgaagaaataaaggtaagctcctcaaatcccaggaaatcctgataggcttgcaccgcatcgttattatgcggggagttgcggaaatacagccggtaatggtgtccctggagcaattttacgtttttatccagagagaagcggtattcctgatggctgcagtctgtgaaaaggatctgctgtgtgttcttaaagaaggcaggttcccgtttggtacaggttccctcaaagactttgtaagactgcgtgtgaatcagccggtataagctgatggtacgcacgaaacagcagattccgaccaggatgctgaggctcaggaacatcttgtcatttgcatggataccatagatgcacccaaaaaggacacaaaataagccgattgccgcttggacaatcagctttgagaataatggtttaggcataagtctcctttcaaaattgttggaatgaaatctgtttattaagatacaaattaccgatggcctgcagcacaggatactggatatgatgaatttgtgcatcctccgtgagtgtctgataggtagtatcggggttctgatatagtttttcaagcagtgctttggaatcccaggattccttttcttctttcatatcgacacatgtgaccagttcggcagtagtaagaggaatcgtctgagtcagtttcagtatcgtttcttctattggagtatacggcatttttttcagatatttccccatatcacggcagccaatcttaccttccaggcgaagctggatacaggtaaaaagccgtaccggaaaagagttggatactggcagaatatgaagattacctaaaaggcgataaagcgcatccacaccagttaagccgtctcccttggcaatcagtccgcggaggatcagacggtttaagtaatgggaaaaggacaggccctcactttttcctgcatcctgcatccgatgttcataggcagtcttcagttcgtagatctggagaatctgaaaagccagacaactccagagaatcagttcgtgttcagaaagatcgtactcctgattattattgattaccattggaaccggtttaccgttagaagatttcgtaaattttaatacaccgattgcagtataaagactcagcatatgtgattcctccttcttatgctaaaagcgcatataattcttcattttcttttaatacctttcttgctttgctctgccaagcccggatatggttgggcggaacattgtagatcttcgcaaggtctgtgcttttataaccctgttgctgcatttgcagggcaatcatgcctttttgcagaacaccgctgctttgctgttctagaagacgtagaaacgtaaaatactcatcggaataagcagtatcttctatgtctttcgatgtatccggagagaagtctgggtgttggaaggcagtcggatctatatccttttccatcagagcatccagggaacagaaccgcttatttctacgcctgcagtctctccagtaatcatagatggcatgtcggattgccgtttttgcatagggttcaaaagggcggttgtggtcatagttcatggcggcccggcagagtgccagatatccaacctgcgtcagttcttccgattcatcgcagggtaaattagggcaagagcgagtcagtgcggataccatcaggggaaccagatccaagtgatcttctgcgagttgcttttccaggtttgtcatatctcacaccgcctttcaagccgctttcacggatacgtgattgtagcggagaaccttctgggattcatggatgagttgctcgcacatatagtcgctgaattttccgatgtgagcctcatggtcactcaggcagaatttatcagcaatccatcggtacgcttcctgcttacttaatattccctgtttccatatttggtcaaagatacggtgggcgcgaatcctcttttggcgcagttctttattggcaagggtccctttgggcattgtggttcctttgtgaacaccgacataggaattacatgccggataatggctgcacacatataccttaccgcccttggatttatttccatatacataagatgcatcccgcaaaatagcagtgcctccgcaatagggacagcgaacgatttgtttcttcatagtagtcatatcacctctcattacgttagttgtacgtataaatatttacgctcatctaggtgtgtgtttgttatacgtatattgtaaatacggcggtgatgaattcccataggacgggagtggaaacaggtcccaattcgggacttttcaccattttctggcatttttagtgggaagcatgtcagtggttcggataaaagatggcttttatcaccggggacatgccgccagagagtttttcataattgacttctgtataaataaacttatcgcagaagtaccgaagcaaaaatagtccgatcaataccagacagagccggtagagatttctgcttttttctgtccgtttatgaaaaccggtaaaccggcagtacagaataaacaccatcggtataaaaatgagtgtggtaaaaatctgatccatggtctgaagaatcattgctaagttcatcatggcttacacctcctgtctatactatttctgtacgtagaatgaacgtaaagagcaactaccagtcatagcaggcattttcctgcgcttttagcagggcaatgcagggacaatacgaggaggggaaatgttgttcttcaaggaaatccctgtacatcattcggaattgttccgctgttatggagcaaaggcattctgcagcttccggataccggggaaataaaatccgcgcatctgaaagcggaagaattaagggagctgccgtctggtccggatgaaatagaaatccaggctctttgcagagtcccggtgtctgacagccgatgcagtttacatagatacagttgtgccagttcccattacaagcatttaagaaatgacggatatgtttggcatccgccgtacaatgtgttgtttccatattcatcaccttaaaaagcaggcagccaggaaaagccgcctgcatgaaacatagattttcgggttacttattattcttacgtttcttgtagtagacaataccgagaacaccgcaaagaaggagtgcggatgaagcaagtcccacatacagaaggattggtgtatcatcaccggttttgaccggattggagacatcaggcgtatcttttggtgtttccggttttgatggttcttccaccagcttcacggtctgattttctgattcgatatcttcgtgcgaagtgatctctgtctctttttcaccatttatcaagaacaatttctcaaatacaaccacatcattgccagcgagggcagtggcatcaaaggtgaaggttacatctactgtactatccggcttttccactttaaaagtggtttctgctgtgaccggtttgccatcaataagaacttctttctttgtctctttatccatcagcgttcctactaatttatattccccggaagggagatttttgtaagatactgtgtcaacaatggtggccttcttttcaaccagcacttcctgatcaccatccttgccatctttggcctgtgttccgatttcagggaaatacaaactttgcggctcagaatcaatttgcatatgtacggccacttctttttcctgataagtgacggactcaaagcacacaagtgtctttcctcttaaagcagaagcgtcaaacgtaaaggtaagttctatgcttccctcggcctcctttggggtaaaggtaagctcggaagtaatcggtttgccatcgatcagaagtgcctcgcccgtttcctgatccatcagggttccggttattttgtattccttatttggaatcagatgatagttcaccgtatccgtaatcgtcagttcctcttttggaagtgcaatctggctgccggtttccgggcaggtggcctgtgtgccgatctccgggaagaacatctgctggccctggtcagaaagtacagcgtgaattgctacttctttcttatcctgtgtgatagactcgaatacaacggttgtccttccttttaaactgctggcatcaaattcaaataccacatctaccgttccagagctttctgctggggtaaaggtagttgttgctgtaaccggcttatcatccaccaaaagcggttctcctgtttcgacatccatgatggttcctgttgcgacatattccagatttggaattaagcctttaaaagaaatggtatccgtaagtttcaccttttcagatgcattggcaaaatgttccccggtctcagaatctgttacctgtgttccgatttcagggaacgaaatctgctggtcctggtcctttagatcagtgtgaactgctaattttaagtccccctgatataattcttcgaaaattacggttgtctgaccagccagggaggttgcatcaaaagtgaaggatacttccacagttccggaagacttctttgcggtaaatgtcttttcggcagtaaccggttttccatctactaagatggcttctccggtttcagcgttcataagattgcccaccagtcggtattcctgcccctttttgagtccggaatattctactgtatctacgagagtcacttttttctccggtttactcatatgggttccagattctttatcaagagcagtagtgccaatctcgatcagatcgtccgtaagggttccaaggtttacggtaatggaatccttatatacagtcacttcaaattttaagagatccatacccttatttgcatcgcatcgctgttcttctacggtgtaagtatcgtagattaaagctcctttcgcatcatccggtgcagaagtaccaaaccagataccatcttctgaagtttcaccccggttggtattggtggtatgtttgttccatttggaagcggtgctggcatatccgtttttatcggttacgatggtatggctttccccagtcgtgttcgatgtgatagcgaatggcacattggcaaggcgtttctgctcaccatcagatactttgacaaattccagatccccgcggactacctgatttaagatggaatgatcttcagcagtgaggtctacgaacttgccgtcttctgtgatatcaaactcaatcgagatgactccctcatttaagtatccttttggagcagaggcctcatctacgcggtaatgaccgaatggaagtgcatcttttgcagtcgaagcgataccatccgcattcgttttcatagtgagaaccacctggccctttgtataagaatttccttctacgatgattggattctcattcagagttgtgatagcaaatgcagcattctccagggtagcacttccctgagccttggattcttttgtttccaaatcccgtttttggattttgacgccgccgcggatgacctgctcaggcacttcagaagcattgtagaaattcacggtttcagcatttccagcagatgtaatcttatggacaaataccgtatcatccgcaagataaccggttggtgcctgggattcctgtacggtagccgttccaagcgggatacacggtgttttgttatccacctgatagtaaaagtcatcgccggataccagataatctttggtaaactgaatctttccatctttatctgttttgaatatccaagtgcggacaggtttggcaccgcttgctgctggatcagaatccaactgctctgtatagaatttcacggtaaactgtgcatcctttaaggcagcaccgccctgtggttttgcttctttggtttcctgatccagtttctgtaacagtagattcattggattgttctgtggtatttcctttgaattcacagtcacagttgcttcagattcaatagttacattgtaagattgagcatccagaatgtaacccttggacgattttaattctttgacagaataactgccaacttccaactcaccagatttggcatatcctttttcatcagtcgtcagcttttcaatcagtttatctccctgataaatgccatattctgcgcctttcaaactgtaatttccattcccatcggagactggagcgttggctgaggcttttttgatttccagataaccataaggcttttgataccaacttccggcaatggtttggctgccttggcctggtacgataaaggcacggaagttcttcggcggatcaggaagtccctggattgcatttgttacttcttttgctttgtcgatatagctctgtggggctccatgaaaagcacctgtcgtatcggaatatcccgcatagatataagcaactgccaggtgtccgattacataagagtcattatcggaccatccgcttaaatactgttctttgatggatttttcatagccatatccaccgtttaggtagtaaagagctttcctgattggggaatcctggctaagaagattgtaggaataggtgcccgtagcaggagtggattttaatggttccatgcaataggctgtgttggaaccatcaaaagtcattcttgaggtaaagtaactgccgtaagggatactcgctccggctttaaagtcgatggtcccatctgcggcatggacagggatactggtccctgccagcgtcccaagggacacgattgcggccaggacaaaagacaaaagtcgttttcccttgccttgtgtatgtgaaaaggcacggcacaccttttcaaaaggttgttttaatttctttagcataaatatcctccttgaatcaaaggttaaataggaaaaggcagcacctgggctgccataaaattaaccggctttttgcttctgacgttcgataatctccagaagttcctgccggtctgtggtgatgagttctttttccagattggatgctttgaactctacggtaatattgttgttgtttgttgaaatcaggccattccccctttggaagtgtgtgatgttcatcacttcagtttctgataaatgcaggatctgttttacccgctgtgcctcctcatcctccatgttgaggacaattttcgtcttgcagttgttgatgataccttttccgtatttaccatcatccagtgcaaagaaatcgtttaaatcctggctggcaaaaatgccggcccctgagtaagcacggatgattttcgcaatctccagaacaaattcggcagcaagacggttgctggaagcaccaatgagctgccatacctcatccacaaagattgctttctcttctgtacgattttccttcgctttatcccagacataatccagagcaacgaacatgcctactgttaataagtcactgcttccggtcaattcggaaatatccagcacggtgtatttgtttgtcagatccacattggtctgctgattgaaagaggatgcagaaccatgtaccagacggtttaaaatgtgtgccagacgttttgtgtcggtgctttccatcagcacatcgtagacatcttccagaatcggcatctttttatactgatcgggatgctcaggatcgatgagagactcgtttttatgtgtaatgccttttcttgcataggttttaatcagtgcctcatctaataactgcttttcttcatggttcatatccggaatcaatagcgagaagaagatatgcagtttttggatctttgcggccagggcagacgcatccagtgtgggaccatccaaaagctcattgaccgagttatccaccttacggatttccatgatgttaatacactttcggctggcaggggaaatctggataaattctccgcccacattcttgcaggcccggtagaactcatgtccctttaaaggagcaatgataaatacctggattcctttccgccgcatccgaagcgccatagtctgcatagtgaaggtcttgcccgcaccggagcatcccaggatacaaatattggaattcttatactgcttggaatcaaagatatctgcaatgaccagtgagttattgtgcttattgacgccaaacaagattccattgtcatcgcaaatgctgtaacttacgaatggatagcagcttgcagcaccggtggtcaggacatttcgcttggaaagtgcaaagagtttcttatttaagtttgccagtggcagcgtagataagaacccttgttcctgaagaaaatagcaggagtgaaggtccatatcctgagagatcagaagtttcttcatctcctgaatccgccattgcaattcttccagagtgtctgctgtaatggtgatgagaagattcatgtagtagaagtcttcgttgttcgctagtccagccttcaagaagtaaccagaacggatcgcagaatccaggtcatcaaaatctgcgttggtgtcggaagcatcttttaacttagatcggttaatccggatctgctgtcccagacgctgctgaatcttgtcctttggctgccgatgcagataaaagtcgatgtcaattccttctcctgcgttaataaggagagagagccatccagccgccactttgctcttatagccgtcagaagggaccataaggtatgcatggtaaacaccgttgattagcacgtaattgctgtgcctgaaatccaacgattctggtgcaacaaattcattgatgctgatgtaatccagctcatctcgtctatctctggcaagataacctgccagaacatcggagatgcgctcctgtaaaggcttatccgtacaaagggtgcggtttaaaagtgtatagaggacatccgtagtaaattcatcctcattgtcgtgagaatcaatctcatttccgcattgatacaggaacgttttggcagtctgtgctgcggtgtcgagagcagcaataatctccttttcttccactttccggtttacattgaaaggctcatactcaaagattaggaaaaatcgtctggatacggcttctctggaacttaatttctttacgaactggatgtaatcttcctggagaaccttacagtgcgggtccgactcacgttccagttccttaattgactgtgccagatgccgattgatgtcggcttttttcgaaatcatttttatatgcagctttaccggactgatctttaagtaagagataaaactgtaaataatacttaactgctctctggtactgcgcagaagaaagttaatcggctgaacctctaaaatttttacataacgatgatctgttgtataaatgatgccgtttgcaattttctctatcggaagataatcttctaacgtctgattacgctttttctttttaactggcttttcagtagcatctggatgcttctttttataggcagcctcctttttctctgccctttctttccggcttgcttcttttttagccgcttttgctgatgctgcggctgatttttgcgcctcccttctaagccgctcacgttcctgtttttcctgtttggcctttcgcaatgcctctgcctgcgccttctttgccatcctctgctcatattttaagaatcggatgtcttcacgcgcctgctttcggatacctcgtttggtggaggtatcaaaggtacggcgctctttttttttacacgccgactgtgaagacgaatcagaactatcatctcctgaagaattatcagaagtagcagtatcggaatgttctttatttttacgtttctttttgcgcacctttggtttcgtcttcggctccttattatgcaccttgcggaaacggtgtttcttgggctccggcagtttgtctgaacggtagatgatccggcggttaataagaaaccggattgcattcattaaaaaggcagtcaaactctcgccggaaatgccgatcagggcgaccattgcagcgggcagagctgtcatgcacagaatgatgatccgaatggtaagtgataacggaagctgcacaactggaacaatgattaaaacagccagaataacagcttcaatcgcattgcgtatcttgaacatgccgcccatgaaggttccgcgttcaataaagttgcggggaatgagagctacattttgttcttccggatttgtcatggctgtacctcctctgcatcagaactctgattagaagaatcatcaggggtggtttccggttcttcaatgacatcatctgtggtatctgcaaacccgccctcctgtctggcctctatttcctctgtcgtaacgggaggaagggaatcatcagtctgacgcatgtaggttcgttgggcggtggatacctgcagcttttcttccccaaagaaaaaagcaccggatgaggtgctgtaggttacggaaagtttgttaccatctggcaaggaaaattgcaggagtgttgcatctttctctggatagctggtctcatctggaagaaactccacagatgaaacaccattttgtccaatttcatcaaagtaagaagggaattgcttcttcagatcctctatctgattttcagagaagaattccttcagtgcatcaaaatggatatattccggctggactaccgttttctctggaacagtagtttctttctctggtattgatgtctggttggactctgtttctttctctgagtcatgtttctccattttccatatggtaggaagtacaattcctacaagaactaatgcgatcattaagaaaatagagagaattactttttttctactcataagatctccttttattttttatcgaaaatccaatatgcacttgcggttgcatggatttcggacatcatatcaaactctctgttgatgtaatttttagactggctgtcattcgggtcattgaccagaaccttcccgcttgatgttaagccacgaaggacaataaaatgtccgccgcgtgtaaataagccggggccttgggaactgataactggacgaccttcagagagtgcttttaaaacggcatttggatcgctggtctggataacagatccgcatccaaagtggctggcggaagcactaaaataagaccagtaggttccaactcctggtttatagtaggaatttccgcaccaggatactgcatctaccggagtaattgtttttccggtcagatagcttgcaaccatggcgaaactggttggaccgcatccgctggaagcgatagagcctccaccgtaaggaatatttccataatcggtttggagatagtggggaatctgcatcccatttgccggataggttcctcctgtgtttgtaatgatgtaataacgaagtacatgatccacgtattctttgtcgccatagatggaataatgccagttgggacgggcgcacatcatatctgagtagacaatggcattttctttcgtgtatccgccatcccgttccatagcccagtcgatatagccggagccgtagttgtaaccttgtaacgccaacttgatgcggtctaagtcggttggccccgtgcatcctgctttatcaagcgcatattttaactcctggataccgcactcgatgctgtattccgggtctgtaatgccgtttggtttgtgtggatatttttgattaaatccgccttcagcagcctgcatgacatctaaaccccgaccaccggattcctgcatcatcaccgcaaggataagttctacatattcactcatcccatatttggcagcaatacgctgcacggtggcccggtaagccagtacctcgtctgagacgttggctgtggcgacaccggaagatgaggaaccaaaaaaggaagtcaggttttccgcataggcatctgcgatttttttctgatcttctgtcagatgaaatacatgatcagcaaaataagcgtctccagcatatttcactgtgtaagtatagcggatgaaggtaacggtctgtgtctgaggctctgtttcttcaccagtttctccttcggcaccgccatccacggtcacttccatggtaacggtctcagtagacacatcataagtgaataggccgtctttgttcgcacggataacgcgctttaattcatttacgttgatatcctggtaattgtctttgctcgcacaaaactgagcaatgagctgattggcgttgaccgagatgctgtacgcataaggatcattgatggaagccgtgtcattctcggaaagtctggaaatcgcagcattgatgtccgataggacagcctggtggctttcttcgaggacttctacaatcgcctgatttgctgtccggatattttcgttaatgagcgtgttgctgttcaatgccccagtatgctctgttaagcttccaaaaatcagtcccggaagcattacaatgaatagaaccggaagcatcaggagggcaattatcacgatgatgaccttggaaattgtgtgtcggttctggattgctgcaccgatggcagcaccaaaagggcccaaagccgcaccttttgcgaatccgaagagagcggcagcggttttcattgattttaaatgtgaggctgcgcttgtgcctacgcctacggcctcatcaatacttgtctgattttctgccatcagatacggtcttttctcgctggggcaggcggcaccttctgtacgatggattcatggtaggcaacttttccatcgccatcttcatacggtgttttggataccgtattctgtgcgtactgtttataccaggtggagccatcgacagactgaacggtatcataggtaccctgagacggcgccatatactgatctgcgtgatacatcgcaaaatcccggctgttttcatttgcggtttctgtgccggtgatgcgtccactgccgatttccatgttggtgaaatttggaagcggtttgttgtcttcagagttcattcccatgtatgagacaaatgccttctctgcgtcttcccctttgatcgaaccaacatgtccgtagttgccctgggcaatcttactgataacattgttggcaaaatcgccgcctttcttcagggaagattgatacatggaatttccgatactggagttttccgtgtacccagtggcagcatcaatggcacttcgctcgacttgccttccaacagcaccagcaagcccgccggataagaaactgccatccacagcagcttttccgggagatgaatttctacggtatccgccaccgccagagccccgcatcgccccagtaaggcttcttcctgcaatcaagagttccgccatcatgtttcctccggtatttccgacattgatgccgagacttgccataaaggaatcaatcttttggcttactttcaaaaacgcaatcgcgcataaaaaccagacaaatacatttccggttacagcttctttgccttggctggcaacagcctgttctacatccgcctctgccagttctgcagcgaagacgggcatagaacaaaatagaaccatacaggcagtcagtgcagcaaacaagatgatttttttcttgtgtttcatttcacgtcctcccttcagatggataatgggtttgcaaggaatgtcccgaccatagaagtaaacagccggagacaccaggcgttcatcagtaacaaaaaaagctggcctccaagcatccggcaccagctcttgaagatatttccggtggactgggatgcacctgtggcaaatgcgactggtgcagtgtagaccagaacacctaaaaggatatagcgttctgccgcttcaaaaagcagcttaatataattccatgcaaggatgagtaccaggatcagtgcaatgatggcaactgcaccgttggcacatacgccgaggatgactgtgattaccgaattgaaatctgcaaattttaatggcggcagttcttcagtaagaatccatccatatggtgtgccgccaattccaagtaccaggtctacgatgtcttttgcataaaatgcaaggaacaggaagatgaaggaacgcatggagagtttcagtggatcttctgcttcaatcccggcaccgagaaaataattcttaaaaagctgccaaacccagtttagcaggatcaggccgattgccagtgccataaagacctggtacagactttcggctgccgggaagtagcgcaggaacgtatccatggagcatccaagcgcgccgagaacggatgtggtaatcaggtccagaatgttcatcacctgttcggctatccattctacgattccatcaagaattcccataaattacgcctccttccttaaccggtccatttgccgcctgcaaagaatggtgtgacgtaagccatgataaatccaagaccatttaagatggcccaggtaatgatgattcgcttcagccaagcacgagattcgtcaactgtttttcctgattttgaaaaattcatcatcagaagtgccaccgatgcggtcacgatggctgcgatagtggaaatcaatacaatctggttatagacatccttcatgatttcactggccttgtcccacatatccgcggccatgactggttggatgttgcaggtaagcagcgtgaagatcagggatgccgtatagatgtatttcatgtagtcaatgtgccgctttttctttggctggttcggcggagtttctttgactgtatgttttctcacgtaagttaacctccttcatagaaaagagggcaaaatggaatccactctgccctgatgcttatagtttcttagcctcttgccggttttcacggcggcaaaaagcagcccggtcaatacaggctgccagatgcgaaacaatatgaagttgtaatgtgttttcacctcccgcaagaaaaaacgcagctcataccggagggagaggcgatcgttccggcaggctgcgtaattcctgcatataattttgacaatacctattttagcatggggagttttacgtgtaaatcgcagaactgtgccagttagtgaaataaggatgccacagttctgccacatagaaaatcaaagaatgagcctgaataaaaaagaagacctcaagctatttttgctttgtgccttccatatcagatagtttaatatttctgaaaaattcattgcagtccacatgaaaaaatctgggaaaataaagtgcctgaagcagtcaagaggaaactgcactggtatgtactggacatgcggattagaaaccatgatgacattggaaagctgatcggagcacagggccatatcaatacgacagggggaggtcttggggaaggaaagcattcttattactgcagtccaaactcggataggggaatctcagatgttaccatctatgatggggtagataatgtgtttgatgtggacagggtgaaagatcatttatgccagacctgtcttgacaaggtgctggaggtaatggaatcgtatgctccagagaatgaaccagccagaccgagagatctatgcctggagggaaggcgaagtacggatatcggcattttatacaccggtgctggaaaatggtcataaggcagaagaatgattgtggaagtaggtgcaatgaggtataattgaggagcattcgaaaaatcggaattgactgaaaggagaatagatgtggaattgaaactcgttagattagaggaagcatatatagacaaattgacaaaaattatggagcgagcttttgatgaagatacaagaatgcatcttggtgaagaaaaaggaggaccagatggatatgataatggtgagtttttgagacggtggggattgcataaggattcttcctcatattgtattttcatgaatgaacagttaattggtggagtaatcctgtggataaatgaaaataaccacaattttttgggaaatatttttattgacccaacttatgaaaatcaaggactaggcataaaggtgtggaatatgattgaaaaattatatcctgatacaaagatttgggaaacagaaacgcctattttttcgagcagaaatcataatttctatgtcaataagtgcggttttcatattattaaaatagataatcccaaaaacaggttagagggtcagtataaactacagaaagtaatgaaataaagtttttgttcttcaaccggagaatggtttgatagggtatatagtttcttttcagaatggaagacttaattttgactgaaagactgcttttgacaattttaccggaaattgtggtaagaagatgatcgaacagcaggaaaagcagatggctagcaaataaccgatacattatgctgccattgccgatttaaaagtaataaaataaccatttcctgcaaggagaatggaaccagaaaacgatagagattttgtcaaatcaataatttggggaggtaactaaatggaaaacagaattgatgagcttcttaataagccatgttatgtaattgattttttgccacaaaaggtatctaagacagctaaaggacatttttttgatgttgaatattacttacttaatagccaaaagcgacatgaaatgaaaaataaatatgtcaatatcattttgaagctgatgtgctattatcgtgtttccgttttgtggaatgggtggaatgataatccaaaaccagaggatatagatgacgctatcatggagattatggaaaatcactctggaactctaaatattctgttttcagaggaaaatgttctattagtttttgaatgggattgtctgaatttaacagcctataacttgtcagaaagcatgaaagaagtagcagaaaagatagcattgtcagaaggctttttctgttggagaggggaaaattaaattcacattttcggaacagttttgaaggaggaaggtcatgtacgaactaattcaggtttcggagcagagctattacattcaaagtccggccaaaatcgggctggtaaggctgaatgagcaggacgtttgcctaatcgacagcggtaacgacaaagacgccggaagaaaagtccggcagcttcttgacgccaacggctggcggctcattgtcatttataacacccactccaacgctgaccacatcggcggcaaccgatatttgcagggatagaccgggtgcaaaatctacgcgccggggatcgactgtgcctttacccgtcaccctgttctggaaccctcttttttgtacggcggctatccgtgtaaggagctgcggcacaaattcctcatggctcaggagagtgacgcccaagagctgacacaggagtgcttgccggagggttttcagatcatccccctgccggggcatttctttgatatggtgggctttcgtactgccaacgatgtggtctatttggcggactgcctatccagccgggaaacgctggacaagtaccagataggctttatttacgatgttgccgcctatttgaatacgctggagatggtgaagtccctccgggccaatatattcgtcccggcccatgcagcggcctccgaggatgtagcggatctcgcgcagtataatatcgacaaggtgctggagattgcagacaagatcactaacatctgccaagaaccgctttgctttgagacaatcctgcaaaggctgttcaccgactacgggctgacaatgaactttgagcaatacgttttggtgggcagcaccatccgctcctatctggcgtggctgaaggataccggcaggctgaacggcctgtttgaaaacaatatgctgctctggcagcgggtgtaggaggaatctacccatgacgatgtacgaaaaattcaaaaagctggacatcgacttttcccagcttggtttagagcagggggacacccacggcgactacttctgtaccccaaagggggcggaggtcatcggctgggcgggggtggacggctattattctggctgacggtaaaactggacacccacaggcagtctgctctgccttgcgctttgagataccgaagcaaatcgagtggaggatggtgttctaccaaaagacggtagaggacatgaaaattgacctacctctgcagtgaagcagataaaagagtgtatcgcagaagtgaaaatttgcgatgcactcttcttcaatagctttcagcactgttttctaaatctttatgaaatcttcaaaggtatcctgtaccctgtctttgaaatcaaaagaaaggacaaaaggatatggaaatgattttgaaaacaactggcctctgcaaaaatttcaaagggcagatggcggtaaacaatgtagctctgaacattcagagaaattctgtctatggattgctgggaccaaatggggcaggcaagtctaccacgctcaaaatgattacaggtattttgaagcccacttccggcagcatcgagtttgacggacacccttggcaacgcagcgatttgaaacagatcggtgcattgattgaaacaccgcccctatacggaaatctgactgcatacgaaaatttgaaagtacggacaacgatgttgggtctgccggataaacggattgatgaagtcttgcacatcgtccgtctgaccgacatcggtaaaaagcgggccgggcaattctccctcggcatgaagcagcgccttggtattgccattgccctgttgaacagcccgcagcttttaattcttgacgagccaactaatggccttgacccggtaggtattgaagaactccgggagctgatccgttctttccctgcaagagggattacagtgattctgtccagccacattctatcggaagttcagcagattgccgatcacgtgggtatcattgccagtggtgtgctgggatatgagaataaacttcgcaccggcgaaaatctggaacagctatttatggacgtggtaaagcgccaccacaaggaggtgtaaaagatgaattacctgaaagcagaacatcttaaattcaagcggacaatttcaaataagctgttgcttattgcgccccttttgacggccctctttgcgtggatcgtcggcggctttcatggcttccaatatatgaccttctactggtggtatgcgtttcttcttcccggaacgattgctatcctgtgttcccttgcccatcagaaagaagaacgggccggaaagtattattctgtattatctgcgcctatcaacctgaaacagtttgaatacgcaaaagcatcaattctgattgagaaattacttatggctgcggtattcttggctgcttttgccgcggtaagcaatttgatttccccagctctggccgtatattccatgggacgaaactttgccggaagtgtcgccttgatgattgcctcaatctggcaagtccccctctgcctgtttctggctcgcaaatccggcttgctgctcccgattgctgctaacaccttgctgggcattctcatacccagcttgcttggaaatacagttctttcgtgggtatgcccctattgctgggctgcaaaaacggcggaactgcttatgggaattgaaagcaatggaacctttataggtgttgcggctttttcatggagcgttttgctgccactggtattctccgtaatcctgtatatcctgctcactctttgggatgcagctaatttttcaaagaaagaggggaagtaaatgggaatgattgctctgattcgtgccgattttatgaaaaagcggcatacatcctattttggtattcatacagtgatccctatagcgggagccattctgttcgtattttattttctgctttatcagaatgtcgatggattgaaaagattacgcttgctcttggaattgaccgcaatggtatttccgcttttgataagcattattgtcggtctgaatatcacacaggaagaaagagcctcgcattttcaaagtctgctggcaatgccgaatcgccagaaaatactgctggcaaaattcgttgctctgtatctgtctggaatcttttctttagcgctgctttttgcgctgtttgcgattggggcaggaatgagccggacagaaattatcccgtggggcctgctgatacaatccgtgctggggctggtaatgggcagcttcgtgatatacgcgctgcacctgttccttagtctgaaatttgggttgggcatttccctgttttggggcgtatttgaatgtttgcaatatgtcttatacagcaacattgaattgcatggtctgtggcggtacattcctttttcatggtctgtaaattgggttcatgatgtgttgaacggcaagctggctacaaatgccgtacagtgggttttagttgccgcgttatctgttggcagtttgcttgcaattctccattggttttctcgttgggagggacgaaagaatgatgaataagacgatgaaatttttcgaggggatgtttcttatggtttgcctctgctgtgttctgtctggctgctctgtcctgcaaaataggatcagggaatattccagcgacaaggagcaatgccacttagtcagtgaagatgtgacgcagttcatctacaagagtgaggcttacaccattctcaataataacgtttccaatgatgggcttggcgaatggcttgggtatattcggcagcttgtggcagtggacgaagccggaactgttttggttcaagaagcgattgaaaccgcctcttttgaaacactgtccgatctggtagacaaagccccggacgccaaatacatcatcccatttttgaatgtgtatgcggtccctaataatgcctctcagctaatcgtggatgtcaacggcggctaccatgaagcggtgccgagcgaccagttcacagcggaggatgaagcctttgacttcaaaactgctgttgaaaatacaagcgacagctatgaaatcaatccgcaaaatgcaacacaactgacctctggtgatcgtatttatcaagtgacagaggaaaccgttccgacagatcagcttggagcatatctggatattctgagcgaaacagtaacttttgacgcggacagcaagcgtccgttgtcaaaggaagaactgaatagaattgattgggccggtacttctgccggacagcaacgagaacgctggttctatgtggatgtgtacgcgatttccggcaccgatccagcggatgccgttgccgtaaaagtaaataatcagtaccatattgcaggggtacagtaatttaccttgacttatggtataatggaaaagattttaacgaggaggcgggaaaagtggctactattcttgcagtagatgatgaacagccaattttagaactcataaaaaacgggctacaaaaggatggacacatggtaacaggctatacgtctgcggaacaggtgccgctggataagctgaaccgctacgatttaatcatactggacattatgatgcccggaaccgatggcttttcgttctgcgaaaaaatccgaggtatggttgactgcccgatcctgttccttacggctaaaacaatggaaaatgacattacttttggcctggggctgggtgctgacgactatctgacaaagcctttccgtatcccggagctgcgggccagagtaaacgcccatatacgccgggaacaaagggaacgccatagctgcctgaacttcgagcatattaaaatagatttgtcagccaaaatggtacagatagatggggaaaccgtgtcccttaccaaaagcgaatatatgatctgtgaatttcttgcccgcaataaagggcaggtatttacacgagaacagatttacgaggctgttttcagtttggacggagaaagtgacaattccacgattgccacccacattaagaacatccgagcaaaactgaaccattttgatattcagccaataacaacagtatgggggatcgggtacaaatgggaatgaagaaaacggcatcacttaaaacagccttttggcgcttcttatttatgctgcttggcggtttgcttggtgcagttgctattccatttctgcttatgactgtcagcacatctttagggcttaccacttatggggactattcagaaatccgggcaaaagaacttgtgccgatccttgcggctacgcctgatttatccgatgtgcagataccgatggggattgaatatgctctgctggataaaaattaccagcttattgaaaccacattagacaaacacgaactggaacaggccatgcggtacgcgaccacgggtgtcagcgatcaaaacttgcaaaaaagatacctgtttgtcacccgcgagaatgaatatgttgtcctgcaatactatattggcgctcaatatacaaatgagtggatgaacgaacatctgccgtccccggatataatgctgattttactggtcgcagcaggaggtatttttgtctgcctgttcctgaccaccagctttgccaaaaagttgcgtttgcagcttgtcccgctgtttgaagccacttcggaggtagcaaaacagaaccttgattttgaagttggacattcacgcattaaggattttgaagatgtgctgatttctttttcccacatgaaagaaagtctgaaagcctctttggaacaacagtggaaagccgaacagatgcagaaagaacagattgccgcacttgcccacgatctgaaaacgcccttgacagttattcagggaaatgccgatcttatcagtgaaacggagctggacgaggaacagcgtttatacgcggaatatatcagcagcagttccgaacagatgcagttatacattcgggcactgatcgacatttcacgagcggcgtccggttatcagtttcacatggaagatattgacctgcccgcttttgcggaacagttacgaggacagattaatgctctgtgccagacgaaaaaaataggattacggatggaagcagatcacttaccttctgtactgcctgcggataagttgctgctggaacgggcgattatgaacgtggtaaataatgcgctggattattcctcacaggacagcttcattcatatctccatgacaggcgataaaggaaatttgaaaatctcggttacagatgcaggccctggcttttcacaggaagatttgcgacacgcgcaagaacagttttatatggcagatcatagccgtagctctaacctgcactttggaatgggactttttatcacaaagtccattgttcagcagcatggcgggcagcttgctttgagcaattccaaaaagaccggaggcgcacaggttataatcttaattccatattgatctcatgggcggctttcgggccgcccttttttcaaatctttatgaaatcttcaaaagtccaatttatgataactgcataagaaaccgactgccagacgacgacaaaagaaaaagctatcgcgcaacatccctcgcggatcataggctcttttcatttgctgaaaaaaagcagccttgcggctacttttcgggtgcggtatcaattaaggctttaacagttgccttgacgacctccaatgaccgatcatcgcaagctgaaagcatacggaggagattttctacctcggaatctttggacggcttctcagggtagaaaatcgaatccgatgatatgttcaatgtacggatcagcttatagaggactttatagctgggttttttgccctcgttctcgatccgatataagtatcgctccgtaatgccttttctgctaacgcttcaatggtaatatcggccttttcacgggcggttttaatgaccacgctgagcgtgtcaggttgattctgcactttcagttcacctccatctataggatttagaccatgtttataatggcatggtaattcaattataagtggtctgacagtgcagaaaaaagtgaactatggcgaaccccgccaaataaaaaaacgaggagttgtaaagaagattattagaaagaaaagttactccatattttaaaaattagcttgaaaatcattttaattgaccttatgattaggtcatcaagcttgatattataaatatttggaggtcataacttgattattgaagaatttagaaacatcaaaattgcgtatcttcgcagaaccggagcatatggtttagaaaatcaaaagctgatggttaactttaagcgatacttaaaagaaaatcaactatttaacaatacaaccgtcattttaggaatccctttagataatccggcaaacaccccttctgaaaaactaaggtatgatgttggcattgttattcagggaagtgaagttcattctctcgatactcgtaaacttgataacggcaaatatgctatatttgaaattccacacacagagcaagatgtaatttcgttttggaataatcttcctaaccttactgctggactgactgtggatgaaacaaagcctgttatagaacgatattctgccatgaaaattgcttctcatttatgcgaattttgtattcccttaaaaagtctgtaagatagatgattagatacggcaataaaacaaatcggaagttgttttgtgcgtcttaggcttataagacgtacttggcaattttgaagttatatagggagggataatatgcttgatacgatacctaatgaagaagaaatgatagctttagttgggaaatttctatatgatgtatggaataagttatgtgctttaattgatgaaaaatatgatatggattgtttgtggaataaaggcggtaaagcatggaaatatgaatataaatatcgtcggggtggtaaaacgttgtgtgcattatatgcaagagaaaactgtgtggggtttatgattatcttagggaaagacgaacggctaaaatttgaaacagatagagaaaattattcaaaagaagtccaagaaatatatgatgaagctcaaacttaccatgatgggaaatggataatgtttgagccagtggatacttctatgtttaatgatttcattagactgttgagaataaaaagaaagccaaatcgcaaataacaattcctgtttgccgagaaaatagtaaaaccagtcggtcaaggggcggtagcaaaatgaaaagttttcataaataaagaagagagagaaaagaaatgagaaacatttttttgagctccagtggcttaaatgataagaccgcgaaattattttggaagtgtatcgataaagaacccaaaaacacaaaagtgatttttgtaccatctgccgcagtggaaaatgatggtgcaagagaaggaattattatatgcatggaacgacttataagcatgggaattcccctcaataatatccttctgtatgatttggcgcttctgctctctgtcggatatgaaaggacatattcaagctatgtcaacaacatacccgcacagattcgtttgatgagcgccgaggaacttgttcagtatgatatcattgttttttgtggaggaaatgccgcagcacttttgcaagaaataaatagaaccgggttttcggagccgcttaagcaggcggtagagtgtggcttggtatatctcggaatcagcgcgggcagcatggtcgctgctggaaattttgctgatggactagggtatttaacaaatttgttgattccacacgctgaaaagggaaattcttgtggagaagtgcctaagaatggggtgattgaattggccgatggtcaagttgtattcattcacggagaacatcaagaaattgtttactagattccagcttttggaggtctatgaaagctggaacagattttgtaacggcaaagctggtatacagtgatttacatcaaattcaagaacagatgagaaatcgccccaataatggtcttatagattttgaactgcagcaaaaatgaacgaaaaaaatattaagcgaaaccctcttattaatgaagtagaaattgatgttgctggtaaatccattagctcaggaaacataaagcggtttgcaatgaagcttttggaggaatgggaggcgggaaagacctaactgatgaagaaattcggaagggcgccgtgcattctcctgatatgagagtccattcgccagataaaagaaagacagcagtcatatttactgatatgataagaaaaaaggaaggagatatttcaaaatgatgaatttcagattggcggagcttagaaaaaggcataatctcacgcagcaggaactgggagatattctctgtgtttcttatcagacgattagtaaatgggaaaatggtgttgcctatccggatatttccatgctgccgcaaatcagcggctattttggagtttcagtagatgtacttctggggttagagcctttggatgaatcttacgctccatcaaattcaggaaaagtggaatactgggaaaaacgggttgagtatctgaagagaacacgtaaaaccatgtggaacgaggattatgtccgctttttggtacgagatgtctggaaaatcgacaggcctgttacagtgctggactgtgggtgcggctttggttcgcttggtatgctgctcatgcccgtgcttccctttggaagtaagtacgtcggtgttgatttttctccgactatgattaaggcagcggatgcgtgctttcaggaactgggcatagaagcgcagtttattatttctgatataatggaatatcagccgaagcggcagtatgatatggtaatcagtcaggctgtattaaggcatgtggataacggagaggtgtttttgcgcaggatggtttcgttcgtgaagaaggaaggattatttgtcagtatagaatgcaaccgggagtttgaggcggacggcttgtatatccagggaatggagtatgataagctgtgtcagcatgacgggctggagaaaatgtggaagacagaattgaaacagcaaaacagggattattctattgccatgaaaatacctcattatttgaaggctgccgggctaaaggatatctcctgcagaatgaatgacaaagtgacggttctgacttcgaaccagcgggatcatgatgagatcttagacagcattataaaggcagatcactggaatgatgagaaaacggacatagaaatagagaaagatattgcatattttatgaatcatggaatgagtagaaaggatgcggaggattattgcaggcagcaaaatgggattgtcaggtttctgaagcagaatgcaggaaaagtagcgctgacgaaaatgacgggattgatgatatcctatggctggaagaggtaaatttttctgttttgtccagctaaagaatctgtttagatatgtttgggggcattttatgagagatggcgaaaacaagaagcaaaaatggactgaaaaagaagtatcatttattgctattttcgtagattggtgcactacagtccgcacaggccatcgcgtagcgacttggttcaatcggtatttgtaaagggggcttataatatgaacataggattttggttatgtggcatattggttattccctttgggattataggaattctatttgcgatacttaaagaaaaagcggctaaatttgtttcaggattcaattctttatctaaagaggaacaagcgctatatgataaagcttatatttctcgcgatattagaaaccaaagttttacttggtctgtcataatgatgattggagcaatgttatcttattttgtaacaccatatatggctattcctgcctttattatttggctgtttttattttttaaggacgttcacttagataatcataaagcgtttgaaaaatatttgctaaaataaattccaatttccaacgaacttggtaactcggaatttgatggggaaagtttttatgagtgatggaataaaaatcagagaagaacggataaccgcagaggaatatatcaatttcttaaaacggacagatctgggttcgcaatatccgaaggaacgatttgaggaaagaatatataaacttgtgaacaacgttacgataagtcttactgcaagaaatgagaatggcttgattgttggcgttttatttgggttgacagattatgtatattggctctatgtaacagatttgggagttgatagagattacgagaggttagggattggaaagcagcttatgaaaatggctcatgaaattgtgggtggtgaaaaggatattgcagtgtatttgattgcaaatgaaaatgccgttccattttatgagaaacttggtatgaaaaaagcaaatgatgtaatgcaatataaccatattgaatggactgaatttacggtatagtagaaaaatacaatttgaatttttgtgaagaatggagaaaatcaaatggagcaaatatggaaagaaatgtttctagcagcaagaaccgtacagaacgggagacaaatatctgattatgtagaagcaggaggagttgctgccgcaatactatcatcatcagggaaaatatacactggtgtctgtgtggatacctgttccacattgggaatttgtgctgaaagaaatgcgatttttaatatgataacaaatggagaacaggaaataaaaaaggtgcttgccattatgccaaggaaaatctggcgctccatgtggcgcttgtcgggaattgatggttcagctcatgcccaacaattatcaagaaattgaaattctgatggattttgaaacagaagaaatcattactcttggtgaacttactcccaagtggtggatataaacaaattccagtttgcttagttggagaatcaagatttataacaggaggaaaaggttactgtgaaaaaataccaatgtccatgttgtgaatgttatacctataatgtccctgcgaatgaggactgtgggtatatttgtcctgtttgtttttgggaaaatgatccttttgttgctaccgatagtgaaccaagcgactccaatcacggaatgacattgaaagaggcaaaaaataattatttgaaatttggtgcttgtgaaaaagcaatgctatgtcatgttcgcgcaccaaaagataatgaaaaagggtaaaggagaaaaaggtagtgctcctgaaggtttaggtgatttatggaatatcatgatgaaaaaataataataaatggattactgttgatgcttccattcctgctaatcagatttgggttactgtctgctttaaacaaagctgcagttaaacgtgccgctttgttttcacctatgtatggaaatgagatgatagcatattggatttatcagatttccaatattgcaatatttgtgtatttatgctttctgaaagttaccatagatacatcctggttgttttatacaggtgcaggaatttatttgacagggttgttgctgtgtgcggtttctattaaggattttgccatgcccgcaaataaagaaatgaatgataatggaatttatcgtttttcacgaaatccaatgtatgtagcttatttcctgatttttacaggaactgctttgctgacaaaatcttggatactatttggaattgtagtcatttttcagatttctgcacattgggttattattgctgaagaaagatggtgcatggaacagttcggagaagcctatcggcaatatatgaaaaaagtcaggcggtatatttagcgtaaatcataggaggaaacggttatttaaggcagcatctatggaaggtgctgtttttttgcatagaaagtgccagcccgcagatactaatagaaaaaaattgaggtgaaaatatggcagttgcgcataaaggcagcatatcaatgggactggttctgattccaattggaatgtataaaacctctcaggacaatgacatccatttcaatcaacttgataaagaaagtaaggccaggattaaatataagaaatactgctcccattgcggaaaggaagtaaccagtgctgatatcataaagggatacgaatatgaaaaagataagtatgtggtgatgacggacgaggaactggaaaagattaagacaaagaaagataagaccattcatattattcagtttgcaaagatgacggaggtcaatatgatctactatgagagggattactatgcagttccggatgctggagcagaaaaagcctatgagcttctccgacagtcactgttatcacagaaaaaggtggcgattgctaagacagtgatcggcaccaatgaaaagctgctggtactgtacccgacaaaagatggaattatcgtaaaaaccctgttttatcatgatgaaatagtagcgatgccaaagcctgtaccgaagatgaaactggatgagaatgagcttgctatggcaaagatgctgattgagaacatgacaagaccatttgtggcagaggaatttcaggacgaatatcaggcaaggcttagggaagcaatcatgaaaaagattcagggacaggagatagtctctgtggataccagcggtccatccaatgtgatcgacctgatggaagcactgcaaaagagtctggaattatcaaaaaatccggacaagaacagcaggaaaaggctgacggggactgcataatggatttattcgattcccgcagtgcaaaccctatgctgattgccaggcagacggaggcttttgatgatccggattacatctatgagctgaagatggacggattccgatgcctttcctatatggaccagaactccattgacctgcgtaacaagcggaatctgaagatgctttccaaattcccagaactgaaggagatttataaaaatgtaaggaatcgctgtattctggatggggaagtagtagtccttgttgatggcgtacctgatttttacaggcttcagaaacgtacattactgactgaccggtttaagattgaactggaagcatcccggtatcctgcatcttatgtggcgtttgactgtatctatgcaggaaaccgggaactgatctgggaacctttgttggagagaaaaaacagcctttctgaacttgtgatagaaaattccagacttgcggtatcaaggtatatagagaagcagggagtggcactgtaccaggcggcagaagccagaaaattggaaggtgttgtagccaagaggaaaaacagcatctattacatgggaaagaaatctaacgagtggacaaaattcaagcgcatggcagatgaagactatgttgtagcgggatatatacagaaagggcagcacacatacagcctggtgattgggaaataccggggagagatgctgatatataaagggcatgtgacttccggtgtaacatctgaagctgtgagtatgctgaaagttactgggaggaatccgtttcggatgctgccaacagaaaataaggacgctgtctgggtagaactggaccatgtatgtacggtggagtatatgccgaatcttcagaattccttacgacagccagtgtttaaaggcttccgggatgatatatttccaaaggaagtgcaaatggaaagctgaaatgaaaaatgggggacttgatttctcttatcccccggtgtataatcaaagcatgaaaggtattcagatgcaagatctgatgccctcagtcaatttaattatttatgtaagataatagcattcttgactttggacggtacggaatgctatttcttattatgtctgttgtctaaataggtcaaagccgcaaaaatcaccaaaagtaaagttaatacttccatcgtattcatgggcatcaccctctttctaaatactagagggcgagatcgaaatgcatccgtctttctgatttaattatacctgttcagtatagcacagtgcattttaccaggcaataagatatgggtttaaagatacatctaatgtaccactttattattccgaaaactgtgagtctatgggggataaaagaaaataacaaagagaagaaagtgtaacaaaatataaggtggaagcaggtaaaacagcttttacacatgaaataatgacccaggaccatatgtgacaatgaagtcggatattgtattttgcaatgaaaactgctaagatgaaacaaaccaataatccggaattttaggaggtacataaccatgaaggacatgattgcatactgtgggctggactgtgaaaaatgcgatgcatatcttgctacaatcaatgatgaccaggcgttgcgtgagaaaactgcacaactatgggctgagttaaataatgcaccgattctgcctgaacatatcaactgtgaaggttgtcgcgttgatggaattaaaactgtatactgtgatagtctctgctctattcgtcagtgtgcgttgaaaaaaggtgtgactacatgtggtgactgtacagaactggaaaaatgccagactgttggaatgattatctcaaataatcccaccgctctggaaaatcttaagggacagactacatagtttgacaactttcagttttcagtctgccaattgacaaataaagcaaaggaaaatgaggtggtatgaggtgaaacgctgcattgcagtatccggaatagtcagatgaaaataatgaaaatcaggaggtttttatggctatttcggaaagaaagatatatcccaggacgggagataaagaaacagtttatttgaatagtgtggtcacaaatcccaatataagtgtgggcgaatacacgatgtataatgattttgtaaatgatccgacacagtttgagaagaacaatgtgctgtaccattatccgatcaatcatgacaggttgatgattggaaagttttgttccattgcctgtggcgctaaatttatattcaatagcgccaaccatacactttcttcactatcgacctatccgtttccactcttttttgaagagtggggactcacgcgggagaaagtaactgattcctgggataataaaggcgatattgtaattggtaacgatgtatggattggctacgaggctgtgatcatggcaggagtcacaattggtgacggggcgattattggaacgagagctgttgtgacaaaagatgtcccgccttatacgattgcaggcggggtgccagccagattgatccggaagcgttttcccgatgtgacaatctcggaactgctgaaaatcaggtggtgggattggccaagagagaggattgctgaaaatatcagtgcaatcaaacagggttgtgttcatgacctgaaatgatgattttataaggcaggagtcctcactgctggagcagtctggtggtgaggactttttaagcgtaggggatatcatcacaaaagaattcaatgtggaaggttgcggaggataaacacatggataaaataattgctttttgtggtctgatttgttcggaatgtcctgtatatattgccactaaaacaggtgacgaagaactaaaagagaaactggcgaaagagtattcaacagattcttttaagtttgaaaaggatgatatgacctgcactggttgtcattccattgaaggagtgaataaaaaaatgtgtgtggaatgtcctatgagacagtgtggcatggagaaaaaacttacccattgtgcagaatgtaatgaatatccgtgccagcatattgagaggtatgttccggccgggagtgaaaatcgtagaactttggatgaattggcgaataaaagataacattaaaattaggaaggaaaatatgcatgaaatacaattgtgcggttatatcggtagcggacatcaatgctgcaagaaagttttatgaggatttattcgggttggaagtatttcaggattatgggataaacatagcttttacctgtggattagctttgcagcaagatttcgattggcttgttcatttaccaaaagaaaatgtattgataaaatctaataatatggagctgtgctttgaggaacaggactttgacggcttcttaaacaaactgaaaaagtaccccaatattgagtgcttgggagaagtgattgagcatagttgggggcagcgtgtcattcgattttatgatttagacggacatatcatagaagttggcgaggatatgaaaatggtgataaagcgttttcttgcttctggtatgactatgaaagaagtgtccgtaaaaatggatgtttctattgaggatttaacaaaactgctgaatagttaaatcgggattgatggaggagtaaaatagtatgaagaaaacattattatttgtaattttacaacaatatgcagattgggaagcagcgtatatttcatctgcgatttctatgttagggcaaggcgaatatgagattaaaacggtatctttatcgaaagattgtgttcaatcaataggtggatttaaagtattgccagattatgatattgagtctgttcccagcgattatgaagccactattttaatcggtggcatgacatggagaaatgaaaatacgcaacagattaaaacgcttgtaaaagattgtactcaaaaaggaaaagtattaggcggtatttgcgatgcttctgcctttttaggtacagtaggtgttttgaatgacatatatcatacaagtaatgatttgaatgacttaaaacagtgggcaggttccatttatacaggagaggaaaaatatattgcaaaacaagcagtgagtgacagaaatataataacagctaacggaacagctccgttggaatttgcaaaagagattttatctgctttaaacgttgcaagtgaagagaaaatattggagtggtacaattttcacaagttgggctattatactgcacccatgcctaaaatgtaaattcccgtttgcggaggaggctcttatgaataagttaatcgtatatatacacggaaaaggtggcagtgcagaggaagcggagcattataaagatctctttaaggactgcgaggtaattggccttgattatgttgcacagtcaccttgggacgcaaaagatgagtttccgaacctatttgactcgatatgcggagattacgaatcggtgacggtcgtcgctaatagcataggtgcttattttacgatgatttccctgaacgacaggcgaatagagaaagcgtttttcatctctcccgttgtgaatatggaaaagttgattaaggatatgatgatgtggacaaatgtaaccgaagatgaactccgtgaaaaaggcgaaattgaaacgatctttggtgagactctttcatggaagtatctctgctatgtaagagagcatcctgcccaatggactattccaacccatattttgtacggcgaaaaagataatttaacatcatacgaaacagtatccgaatttgtaaatcagagcaacgcaacacttactgtcatgaaaaatggagagcattggttccacacagaggatcaaatgaaatatcttgataactggatagaacagtttgcttgataaatcggtatttgtatggagggactaatcaatgatgccagatgaaattttagaatattgtcttaataaattggaaggtacagttttaattaacagttggggagaaagaggaatattctataatcctgacaacaagctgaaacgaggcgtgtacattttaacagtgaaagaaaaagatggtgaaaatgatagaagctccaagttaaatcgggaaaatgtataccgtgtcaatttaggcgtgtacaaggatacttttaaggaaatatttgatattatccctaaaagaccgggcaaaggcggaattgtcgatatggattatgatttttcggcaacaaatcaaattctgccgcatcctgtgtatgggtggatgggatggatatgtgttttaaatccatctgaaaaaacatttgaggaattaaaacctctgattcaggaagcctatgaatacgcaaagaaaaagtacaataaaagaaaggcataactacttgtttgtttaactgaaatcggtatttgaggagcaaaaatatgaatgaatatacctatgttaatttaagacaaatccccgaattagaagaaaaagcggctacatggtttcacgataaatggggagtgccacaagaagcttatcttgaatgtatggatgcctatctcaataatgaaacagagtatggctggtatctttgcttagatagcggacgcattgtaggcggtcttggagtaatcgaaaatgatttccatgacaggaaagaccttacgccaaatgtatgtgcagtatatactgaaaaggaatatcgctgtcggggaattgcaggacaattacttgatatagttgtgaaggatatgaagtccaaaggaattaccccaatttatttaattacagaccatacaagtttttatgaaagatatggttgggattttttgtgtatggttcaaggagacaatgaacctgatatgacaagaatgtatattcatagataaattcccgtttggtgaattgatagacctaaagaatttggtaaaaaaatgttttgatactattattgtgaagcttatttgccagccatctatgaagatatgctattttggcaatagtagttgatatagttattccaacatatatttggtaggaaggggcggaaaaccgcccctaaagttttgtttaaaggttctgcttaataatccgggtgatgatccccaccgccacatttctatcttcatctatgtgcgtaacgacaaaggaaacattgtctttcttcccgactgtacggctgtcatagcaggaatgtgcgatggcgttgacaccgatggagagccggacaaagaccgtgcctttgtggatatcttccacggtgccggcatatttgccctgaaccttgcatttctttatgttttccttgctggtattgccttccacacttttgacatctgctttgatagaaatatgttcggcgtcttcagcctgtacgttcaggatgcgtaccagaatatgttctccaacatggaagcgttctctggcatctccaagccagtcaaaagaaagatcgcgggccaggatggaggtttcgactccgaagatttctgcccgaaccaccttttcagcgacagcaatgactctggcttgcacgatgcggtcctcatggatctttggggtgccggaagtatctttgtccagatagaaaatctgacgctttttcagcatggcttccttacggctggctacaatgctgcgggttccgttatcaagacctttcacaataaagtcaatctcgcagccaagcatattattgaggactttattctggcgcagagccagttccccgtaatcatgttcggcatcctgaaccagatttatcatcatttcagtaacggggatgacgatacggaagtccttataataaacgatggcaatcagactgccggtttctgttttttcaatacctccgagcataccggtcaggatttttctggtccggtaggcgttctggatatcgtgccaggctaagtcagccttagactgggctgtttccagtacggtatcggaatcaagggttaatacgggtgcatttgtaaatgtgttttgttcgtttggcataaatatactcctttcttatgacatgatagaatctttatctaaaggaaccatttcaggctctggaagatcatccataaactcttcccgaagcaaatcttccggaaaatctacatactctggttcctgataaacaggttcatttgcagcaagtaccggctcttttactctttttgacgagctggcaccagcggttcttttccttttaggtttcgatgggatacttggcatgtggtcaaatttatcctgatcctcggactgcctccattttgggatatgatcggatgcctttttagggatgagcttttttgcatccggatgcaacgtataatcatacttttctacctttagcaccttttgtcctctcaaaatgatcagtgctgtatcaagcgggaggcgaagcacttcgtctggtgtcaaaagcctccttttaccaatcgacctggtttgacggtattccggtgtataatcagatacgcgccaggtgtttaattgttttgcttcagagctgacacctaccgatgtatcgccgcttctggcgctgactgcttcagccgtcacctcatcggtacatcctaaaaatagttgggtatcatgaggtaaggttcagctcatcccttgcaggacttgcatcccctccctcccaaaccgcacgtacacctctcgatgtatacggctttccgcttactatatttgcggtgtttaagaatgaatcaattgatggcagtccgggcataccaccagagtttttcgtctcctctttcgcatgagaagcacccactctgagttgcccttcaggtctttcagtttcttaacttggtgaatttccagatttctgcattccttattgcacaattcacaggtatgacgttccactctttgcttcagggtgttggttttagcatattttgagtattgtggcaactcactgacattatcaaattttgttgccttttctttacgcttgaatccatccctataaaaagttgtggttttcctgcctgcttttgtatcatatgcaaccgtaaataagtctccgacacaatatctgcgtttgatttcatggacatttgttttgtatttacacgcaaatgttttgtacatactatatttcatgacattggcaaatttacctattttatgggcatcatttgcaatagaatagtaattgtacaatccacgtacttctgcattatatcttgccagaatctctatatcactctgattcaccagcttgcccctgtgcagggcaacgaatctttctctgccattttcgttaatcttgattttgatagcattatattccagtaactttcctacccacttttctctgggtaccagcaatctcaccactcctgcatggcttcttactttataaccacctgctgacttctttaattcctgacttctggatactgtgatgtcatatcctaaaaatctggctctgtctccggtatgcgttactttcgtttttgcatcggacatctctaaatctaatctgtccattaggaacttgccaacgtcagatttaatctgttcggcatcttttttgttcccgattactccaataataaaatcatcggcgtaacgtacatactggatacgcttataggaatcatctaatggcagtgcaggtgttatttgtctttccactgtttccagtgcctttagccttttagttctttccatgcgttcatccggggataaatccgtccacttttccttgcctttgcgcctaaaataagatgctcttttcatggctttattgtactccggattcattcttcttttctttccctgactaaatgcctgtgcatagttttccatgaacttatccagttcgtgtagatatacatttgcaagcactggactaacaccggacccctgcgggacaccgctgtatgtcctgttgtatgtccattgctccatatatcctgcttttaggaacttccaaataagctgtataaatgtctcatcatctatgcgctttctcagaagccgaataatcgtgtggtgattaaaactatcaaaacaggcgtgaatatcaccttctacaaaccagtttgcacctgtaaaggtactctgtatctgctgtaatgccgtctgacagcttttgtttggtctgaacccatgtgaggtttttctgaacactggttcataaatgctctctaaaatcattttcactacttcctgcacaagcttgtcatttcccgactggattcccagcggacgctttttattgctgtttttctttgcaatgtattcccttcgtgcaggttttggctggtaacttctgtccctcagggaatctataatcccgttgattctttcgtcactcattccatcaatcgttgttccgtcagcaccggcagtcatactgccggtatttgcatatatgttcttatatgcaagccaatagaactctggattgtacagattccgatacaacctctgaaatctgtatgattcattctttgacttttccgtcaaactacataatacttcgattggatttctcaatgcctctcgcaccgtcctttcttcttgtattagtaaataagctgctccccttcgccatgtgaacgtcattaacgtctcggactactatgggagctgtgtgaccatgcccgttaccgggtttaggtcatccacggttagtaaatataggattagcattcagtgttgtcggcaccgactttcgccatttacccactgtcttgtggttgtctttccatgagtatcgcttgattccacaattgcgaaatgtaatcaacatggaatagcatacgtttcaatccttttcgtatgcggagtcgggttcccccactctggctatcgttcaggcagtttagctttatacctcatacactgatttttatttttgtacattcggtcacttaggattaacatcctcctgtacaggctctcacttaaaggatagtaagagcgacaacatgctacactccccttcgggtttcccctctcggataagttgtaaaataataggctgtgatttttcatcacttgatacttttacctaccgcttgctaaaggcggaatcctataagtaccacgtcgccaatttatatcgcgctggcggcttccgtgcgcacgcagttgccgataatttcctgccactggtttaagggatagcggttctgcatctggggaaggttctggaggatacaggaaatactaagccccctggaacggcacacggaaattttcttattcagctccagaatggcgcctgtgtttgccagttcgtccgccaggatatgtacaggcaccggcagccgtccgttctccccatttttgtctgcataacgcaccagtttgataaatacgaaggtcataaacagggaggacaggaaatcaaaggtgctgtcctggtcggaggtgatgcagaagtaagcgcatttttccttcccgggaagtgtcaggtcaatttcgtcgtaggacgtgatctggcggatcagcttattctggaaaacctgcagccttgccccaagtccgatgatgacaccggaacgcacggtatcgctggcctgcttgtagatgcagtagggcactttggcagggtggcttacgggaagcaggtcaaagaggctgttcagctctttttcggagctgagcgtcagcagtttgtaaacctgcccgatatttttggattccggcgggaagccctgttctacatagaggacaagggctttcagcaggttcagctccgcattgtcccagaaatggtcgcctttggcggaaccggtattctggataatgacgtcggaaaatacctgcgccattgtttcctgcccgccgatctccataaggcagttccaggcatcggagttctccggatttaccagattgaaacagcggacagtgtagccttcgttctccaggtaacctgccatactttcataaagctcggattttggatcagtaatgatcaggctctccccgcgggcaacgcactggaagatcatatttctggcaaaggccctggatttcatggagccgctggcaccatacacggcgatattccggttcatccgcgtttcataaggaaggcagacggccttcccgttgagctttcccaggatggtgcctttgtttttctttatgttgtcagtcagctccagaactttatacatttcatccggcgtcataaaaccggatgtgccgtaagtgcctttggcggaatagttcaggttccgttctttatcaaacacttccccgttccggtcatatcccatccgcatcagcaggaagatgagcaggccgagaacgaggaggcatgaaaaaatcccatacaggttgtacgggaaaaaggtgagcgccttcaggcacatctgcgggtgaggggaaggggcctgtgggtaagtgccgtttccggcaaaatttcccgcggcactccagacctggtagttgcggataaactgtgctgtatagccgcccgcatacagaaggcacaggcatatgggaaggagaaaaatcagcttccaccatttacggttcatgtaaaaacccctttctgaatttcatcaggtcaatactggaaaaacggatgtcggcggataagtattccttcaggacgggaagctggaagtcaaaacagatcaggttcccgcaggtgccgtacacattcagcccggtattgaaacggttgattcgctgcatgtcaaaatcataggcgaggatggtggggctgccgtccggggatacggcatcatgttctatggggatatcacccctggggctgccctggtcagagagcagaagccggtttagctgcgccatcattttggggttacacagcagccgcagcagcgtttccccctggaagtcgctggtgaggaaatggaaatgctcaaaggaggtatccagcataaagaggcttcgcctgtagccgcctgtgctggtcagcagcttgaatgccgttcccatgtcatccccaaacatgactgcccggattttgggatgtcccgggtaagggtatccctgcaggtaatgctgcaggaaggcgttgagccggacttcggttttatactcccatttcaggacgccgcctccggtgttatagacggcaaatacacattgcggggctaaaaggattcccatgctcctggaatttttgatcttggttgttacttctcccagttcctttatttcacgggaggaataaaacagcggaaggcttcgcaaatctatggaagcggcttcgcgttcttttgtgaagatccccggtttctggtcaggataaaagggaatgccggaatgaagcagtgtcaggtatgtctgggctttctggtgaagccggagacgtctggaaggttcactgcggatccggctggtttccgtattcccggtcaggtaacactgaaaacgttcgggataacaggagagcagcatttctttggatcgtccggtaagccggtatcccctgagcctgtccctgtaatgggtgcggatcagtttttccgcttttaattcggtgatcaccttttccgcataggatgggctggaaaagaacctctctgtctgtccggatggaaactccccgcatattccgatcaattccagaaaacgggccttttgggtgtcgggctttatcaaataagcatcacctctgttcaaaaaatacctaagcaagcctatacttgggtaaaaggatttcttttggaagcataaaaaaacagggaaaacaggttccctgaagcagtttttacccatgtcggaaaacgggctgaaaaaatcacgaaatttccgatatggtttccaggcggctcatacggctgtctacccatgccggaaacacggctttctccatgatatagactacggtgtagtctttttcgcccaattctgttgtatggtaggaatcgcagaacagcccggtgtcatccaggaggacataggccgctatcgtatccaggatctgtttaaattccaggttatcgtaatcccggatcctctgccgggaaagcgtccggtcatatacctggctgaagcagacaacacaatcctgatacagggacaggctgtggttttttaagtattcctgcaatacatagtttaacggctcatggagaaaggcagtgttggtcctgagcttccgtttgggaagcaggccggggagcgtgaccgccaggatgccgttttcagaggaaatggaaatcccctgggcatccgctgcaagcttcatgtagtcatttttgccggataggtctgtgatatagaccaggttcctgagctggcatgcaatccgctctgcccggagcgctgcgtcggtactcagtgcctcataattttccccgtacttctgcatatctgttgcttttaaggcaaacaggatgttgttcagcttgaggatttcattttctatgccctgcagtctttggtagatggttttggtgtttggattcatggcacctccttctttttatagtagctgacagccccatccggttttacgacacagtaagcaagaacctctccaacggtaagtttctttgcctgatcctcagattccagtacgagaagccggttcgtatcctgttctttcatattttcaaagatatggtttatcaaagcttcctgtcctgtacctacgtagatgacttcatacgtctcatcgctggagaagaaatgaagcttgaccggaaactcgccggcagtatggtagataattgcctttttgaaatccagaaggacccagaaagcagcaatcatcccgtaatcaggggaaactgcggcttccgggctgtcgcataaaagcccggattccttatcgtggtagagccggtgctgttttaccaggcttgttatgagtgattttgtagaatcttcttttttagggaatagctgcagcacctgttcatagcgcaggacatggtaggtggtgatgatccgcagcagcctggcgccttcccctttgtatatctggtctcgtgttttcatggatgtctcccttcctaatcttatatagaagaaactatacgtatatccttacgtacaatgtacatatacagccatgcgtgtgctgtacgtataactgtaagtatggcttgctgccagttttggtttataggtacaaaaaaagcaccggtcagggtgctggtaaaaagaaaactataagcaatacctattgtagcatgggtaaaattacgcttcaatcgcagaagtgtgccaattatatgccaagcaaatattgccataattggccaaatgaattataattatgtaaaggtatgaaccgaggataatacttgattatcatcactcagattataggaggcaatatggaatatttcgtatatatgacaaatgattgtaatttgaaatgtaaatactgttctgtcttattagattgtgaaaaaaacagtttaccaattaagcctacatatagttatgaagagcttatcgcctttattaaggatacacaaactttaaccaaggatgatgaaatttctatatacttctttggcggagaaccatcgctagaatatgatgatatagagattctgattagtattgccaaaaaggaattgtccgattacatcttaaaatttgttctccacactaacggattacgccttgatgttttgccggaaaaaattctcaatgaattatcgcttataatgttctccataaattatgagaaaattcctcatcatatactttatccgagctatttttcgacaattattgataatgccttgtccgttaaaatgagaaagccaatacctattattgctcgtcttaccattacagaacaaacaagcatatttaccgaacttttacaggtaagtaatttctttgattatgtatattggcaaattgagaattgcaatacttttaataacgctactgtatttaagaacacgtatatatatgaaatacagagaacatttgaatattggattaaatatttggaacagggaattatgattaaatatattccttttatggctgttttaaaattcatgtttttccatgatcgcaatgataatgaattttcctgtggctatagtcgtggaatgatttatatacaaacaaacggaaaatgttatgcgtgtagtgataatgttgagggaaacgctcattacatgggagatatttataaaggtgttactctccctcatcataaattaagcgaattcaagtgtaagagttgcccttaccgaccactatgtatgggaagatgtggaagaatgcatatagaattttcaaaagaacacattaatgattactgccaaatgaatcaagctatgtttgatttgtttttagataataaaatagttctggaaaaaataataaagagaaatccatctttcaaaactgaattagaaaattggatattagaatatacagaattcactccatgataatcaagagggttatctatcgggaggagactgtacctgtttcctcccgatacaaaatcaaaataattctcttaattcttcatatttttctttataatatttcattaatttgcttccaaaagaggaacggagctgccaagagggcggtaataatgtcgctccgtatatttttgtattaatttccgtatttaacatacgatttaatcccagaatcttacagaacttctcaccttgaagagttgatgcctctgttataatattagtaacatagatctctctttctacagccaattccatcatcatttttaatactgcattgtatagcttatgaaaagctgaggtattttgataatctggatgtatacaaacacaggcaatatataatttgtaaaagtcaggaacatcatattttcttaaattgtctgtggtcaaatcattatctttaaaatatcccgattgaatatcttcataaagctgatctgtaactggaagaattgtaaaataacctacgatagcgtttgtcacagtactacgaacagcaatatgggtataattattatattggtaccacgcatatgtaatatctggtggtgcgatcaaatcttctctaagcactaaacgatcaatttcatacattgtaacgaagtccttgtagataagatcattaggccatacaatctcaaaccgatccttgggtattattttgttatgtaataaatatttagagtaccactcaaggactgctgtcatgctcatttctgcaagctttttccgatctgaatcattagttaacaatgacatattcgtatctaaggcgggtgtactcaaaagctttaaatgctcatagatattttcagttaaaccaatagatgaaacttttattaggtctaactttcctatagttgtatcaatagaatttctttttattggaagatgtgtaaataaatcatcaataatagtaattgcaatttgggaagcatgtaaaacagcagcacggacattaatctcaacaatttgctcgtactcgctcaataatatgctaatcgtattagcggtaggggtatcgcatgaattaaattttttaacagctttttggaaggatataccagggaaatctttttcgtattttttcttaatctgaacaatattatcaaataattcatttgcgcaggtgtctatattatcaggatctaagagtaaatattttaatgtcagtagcataggaaaacgtttcgcaacatcttcaatagaaacatcacatagcacaggaattatactatgctggttagtttttcctaatgcaagtccaatttctacaggtgtccaaaaactttcaaaaaatgctggtgttatgataagaatggtgcatagtgctgtagctacgcccttttcaacagcagccaaaatggtatcacctgctaatatttcattggcatcaagccaaacatcaatattattcttctcaagtttctgaactagctcaaatacaattttttctttatctttcgatgaatgtgatataaaagcgtcaaacatgttttgtcctctacatataatctatctttattgtaaaaatgtataatgtcagccaccggtatcaataaataacggatagtatgatattatttacccctataacactggataactacaagttatcttgtaatttaagtgatgataatcaagtattatcctcggttcagaggtggaataggctaataaaatccgcttgaactgtctggaaatccaagcggattttgtctgctttacaatgaaagacttacggttattctaatttcatgaaattccgaggatgttttgtggctaaaatattattttgtttcgacatggaaacgttggtatagatctctgtagttttgattgaactgtggccaagcattttttgtatatatcgtatgtcaacgtctgcttccaaaagcagtgttgcaaatgaatgccggaacatatgaggggttatatgcatgtcaatccctgctatattcagatattttataatcatctctcgtactgactgttcggaatatctttgatgcagcctatttataaaaaaccaaccgcaagatgtaatatcgggtttaaaagctgtgtagtattctaataaaattttgcgaatatcatcgttgcttatctgaatcattcgttctttggaacccttcccgtagattattattttatacgaagataaatctacctgttggggtgttagtgtgcataattcagaaatccggacgccagtagcaaacaataattcaactaatgttatgtcacggagaatggcattgcgttgatatttgcttgttgcaagtgatctttgcttatatatagtggatataaagctttctatgatagattctgggattgttcgtggtagtgttattggttcacggaactttatgttaatcttgtcaaaaggatttaatgaaattttttcttcgtaaattagataatggtaaaatgcttttatagtggcaatcttccttttggcagttttgggttgaaatcgttggtgaagcgaagaaatatattcacttaaatatattttattaataaagtcaggatactcttgcataaatgtgctgaattgagccaaatcaatacggtatgctttaagcgtctttttgtccagcttttttatcgtttcacggttcttcaaataagcagtaattagcgtttctaagttttccatgaatagacaccctccttaacgtttttattgttaattatgagtgtctattgctgaaatgtcgaatattattccgggaaaagctggttcaggatattgacggtttcttttgccgtatatccccagagtatcgtactcagggcctcaatagcgtcacgacgattccggtaataggtccggtaggagatattgatgatgtggggggactagatttttaatctcgcactggcaagacaacgacctgtgtgaatttaggtattggatttgcatggattaataaaattattttttgtgaaaatatattgcataaaaaataaattctggtataatagtagtatgaaagaagaaaattaggaggtttcgttatgataatagaaatgagagcaaaaaactgtttttcgtttgaagatcagattgcactttcaatgaaggcggatatgcggaacaaaaagtttgcttctaatgtgcatagggagaataattttaatgttttaaaaacagttggcatctatggaccgaataatgcaggaaaaacatgcctggtaaaatgcattcgtgcaatcaagcagattttattgaacaaagagacgagtctgataccaaacatcttctcaaaaaatcctgtttgcgaattaggagtcactttcttggctgatggcaagaaatatgcttatgattttatgtacgatgctaggaaggaagaatttatctacgaaaaatttgttgatattactaaggatcaatacgggaatgagaaagagatagtctggctgcttagtgacagccgaaaagaggagtattattgtgtagacgaagaaatgatacaaatgatgtcgatggttggcagaaatagcctgctctgttatatggttgatgccagcaagttcaaacacattgcagaaatgaagagaattatttccggatttgcagagaaaatcgatctcatcaatatgaatgatattccaataaaaaaaacgattgagttgatgaagaatgagaatcagctgcaacaaaaggtcgtggagtttataaaaaatgcggatctttatatggaaaactttgagtatgtagatatggataaaatccaggtagatattcacagaaaggaggaaaaaccggaagaaaaggtattggatataccggaacgggtgctggatcaaatccggcttgtttccacatataagggggttcgggttccaagcttgttgtttgattccacaggtacaaaaaaaattgccgcattggcaagttatattgtggaaggattggagcagggaaggatacttgtagtggatgagcttgacagcagtattcattttaaattaactcgcgcgattgttgctatgtttaataacgagttaaacagtagcgcccagttgattttcacagtacatgatatcaacctgatggactgcaagcgtatgttccgaaaagaacagatttggttcgtccataaagatgaagaaggcgtatatgtatattcactggctgattttacagcgcagcaaggggttcgtgatacgactgatattatggaaaaatacagaaagggtgcattaggtgcgcttcctgaccctgaactgatcaattcgcttttggaattgaaagggaataagaaaggagcggatgtcgatgcagaataggctgccagccttccttaacaaatgtagagtgtgcattatctgcgaaggggatgaagaatatgattatttagatagattaaacaagattgaggtatggaacaaagcgtacaaagtaactttggacaatgcgggtggaaacgggaatattccggccagatatcaggacagatatcagaacggaagttatgatattgtactaatcttctgtgatacagagaaaaagccctatgagcagtatgaagacattaagcaaaaaataaacgagttccatggtgttgatcatgctgctgaagaagtaattattttcggaaacccgtgtaccatgcagattattatagaacattgggcagatgtgaagttaagaacaccggcaaaaaaagtaaattcagaaattattggtaaattaaccggagtgaataattataaaggacgggcagatcaacggtcggaattgatgagtcagataaccgctgaaaactatcttaccatgtctgaacgggtcaaaaaaatgaaaagtgatgacacagtgattggcagcagtaattttgagcgtctggttgattatttagcgacagatgataccacatgggtagagaaaattaatgcaatattggaggagtgagcattatgaaactaaaaaaacagttcggagaattttatgatgaaattacaattaaagacgaaagtgagccattgggagaaaaaagagagattcttcaaaaagatattgaagaccgacttcctgatgaattggcctctcatgggatagacctgaaaaagagcgatattgagatattcgaccagggaagctataaatataatacaaccatcaaatccaatgtcattgatcgggatgttgcagttaagattcctttagacataaatcaatacccggatacaagaaagattaaaggttatttaagagatgctattgactacgtggcagccagaacagtcaatattaaagagccgtgtgtcaatgtggcatattttgaaaaaggtgaagaatggatgcatattgatctgccgctttacgcagagtatgatgggaaagtttatttggcaagaggacgagaatttgcagataattattcatgggaaattgcagatcctaaaggtttaaatcaggatttatgtgataagattaatgggaatgcacagctgagaagaatcattcgatatatcaaaaagtggagaaacgaaaagtatgctaactcaacattagatcatgaagtgccaccgagtattggacttacttatttggcgtgcgattacttccaggaagtgactactccagaaggagacgatgatttaactgcgctacagcaaacaatgagtgcgattagggattcattcatccttacgaaagaaaatggaatcatcgtaaaggcagatattaccagatatttaccggtagaaccatttacggatattttcgcgataatgaaagaaagcagtgacagttatggagtcaaattttataatcgtctttcaaaggctgtagagaatttaacaaatgcagttaatgtagaatcggaacatgatgcggggaactatgtgcaaaaagtgttcggagaggaatttgaagtaccgcccaaacaggtatcatcggccgctatagtcagtaaaaaggagcagagttttggataaagtggattttgtaaagcaaatcatagagtcgtatgatggtatagaatttacaagagaaaacgatgggattgttttttttcagtaccgggataaggaatatggttgttggtatccagatgcggataaggatagcagcagtcctattcttgtggtaaaaaatgatgaaaattatgattatccgcatattttgccatttaatgttccattagaaatcaataaatcagatcaatatagatgtatatgcctttatgaaacggaaagcacagttaagtatttacaaagcaaagaagaaaaagtgaaagatgttattgaccgacttctcatattattatcgctatctccattggagagggaacacgaatttcaaaaggagtttgtatattattgggataacatggcagagaacaacacaccggttcagatctatgcaggaagtacaagagaatttcaaagactcaatttatattttgatggtaaaagtacgctccggtatgttgcgaatggaataaaattatcagatgcaaaagcagacgataaaggaaagaaaaaatggaaccataaaccagaggtgccgggtttttatattccgatagaagataaccgtaggatattaccgccaacacgagatcggaagtggaaagcggatgacatattaagaatagtatgtggtaaagacttacgtaggatttctcatgagacatatcaaaaattgaatcaggaaaaaattaagacccaaaaagtatcgttaatatttgaaatgaaggtaaatggaaactgtgtgatttttaccgctacgataacttttcggagtgcaaaaacggatactcttatgaataagctgcgccaagatattatgaatgttcagattgtaaaaagcaggcggattgattattactttttatgtaagcagattggaaatgacacctctttatattgtaaaaaaatactattggtaggtgcaggatcattagggagctataccgcaagagagcttataagggctggtattcgtgatattacggtatatgatgccgatgatttagaaaaagaaaatttacttcggcatacctgtgatgattattgtgttggtttttctaaagtattcgctttaaaatttgaattggagagactgcatccggaaatacatatcgaagcggttaatcgagatgtacaagcagcagagtttgtggaaattttgccgcaatttgatatggcgattataacggttggatcaagtgatattcaaatagaaatgaatcgggcattaaaacaaggacattgtaataagccggtaatcttcacttggctggaggccggcgggaagaacagccatattctgacagttgataataactatgaaggctgctttcagtgtttatttaccgatgctaatggaagaagaatcaacaacaaggtgaatcgtttatcggtggaaaaaacagaacaaaacaagatccgcaatggttgtggtggaaccagggcagcatacggaaatgccattttgttacgaactgtggcagcattattgaatatcatgcaagaaatatttgatgggaaaattcacatgaataaattattcgatattatccctacacaagtaatagatatggggaatgattttagggaaaggaaatgtcagtgctgcagtaatgaatatagtagaaggttgtataaagatgatgcttcctaatggcaaaatagttgatattttatcggaagttatgtgcgaacttcgtaagtggttgcaagatacatcgaccaaggctgaagctggaggttatattgtgggctatcagcatagtcaaactgggaatataactcttgaagatgtctctacgccatactctttagataaaaggacacgtactcgatttgtaatgcatgaccccagacatagattgttcttgtttcaaaggaagtttcaaaagagctattatatgggtgtatggcatacgcatccgcaaaatgtgccgattccatcctcaatagattgggatgactggtatggcacacttgaagtagataagaccggatgtgagtatgcgtttttcgttatattgggcatatcagaaatgcgagtgtgggtcggggatttcagaaccaaaataattatagaaatacaggaatgtcaaaagcagaatggtatatatctgttaagatagcaaggaggatttatggaaaaggaaccaaaaaggccaactataccacaaaaaacaagagaacaattatatataaaggctggaggacgttgtgaattccggggttgcaacaaatacctttttacagatggtgtgacaagacaaccaagaaaaatggcaaatattgcacatattgttagctggacaccaacgggaccacgaggaaatgaaaattcagaaaaacttgcaaaggatatatctaatttgatgcttacatgtgcggaacataataatttaattgacagtaatgaatacgttgatgagtatccagtagagttattacagcaatttaaacgtgagcatgaagaacgaatttaccgggtaactggcatgggacaagaatatggtgtgcgtattgttaaaatgtatagtaaaattcaaaatcaggtgccaatcatcggggataaagatgtaagtgaagcaatcaggccctattatccactagatacaggcataaatattgatttaacgcaggttgaaaatattaaggaagcacaaaaacaaataaaaaggacagtagatttacatattttgtcagatgaaaaggaagaaagctatagaatttttataatggctaaaatcccatatgcatgttatctggggtatgtacttgggaataaagttaaatcagaggtatttcagttttttagggatactcaggattggaaatggagaaccggagaatttgggcattttactattgtgaaaccaacggaaagattggatgagcagcaagttgatttactggttgaagtaagcggaaacattgattgtacgttaataccggagtttcccatatatagtgtaagagctgattcaccagggtttctgtttctgcagagcaaggagcagctcatagagtttcgcttaaaatttagggaggtacttagttcaattagagaaatacacggtgaagcatgtattgttcatctaatagtggcggcacccaatccggttacatttgaaataggaaaatctattatgagaaatatagaccctactattttgttatatgacaaagtacaggatgacataaaatataaagagatcatgtgcttgcataaaagaataaatagaaccgaagacatttaaataagacaggggttttatccctcacattatccaccaccctatatccccggaatgccggaaagcacaggcgctccggggatgccttttataacaaattgtgttcctttttcaatatatcgtctttgagtgcaacagcaatatcgttactctgggaaaaactggttcaggatattgacggtttcttttgccgtatatccccagagtatcgtactcagtgcctcaatagcgtcacgacgtttccggtaataggtccggtaggagatattgctgatgtgaggttccagtttttcgatgatttcatcggtatttttcagctcctgaggggacagaaacgcatagtagaggatccagtaatattgttccccgtgcttatgactgctcctaagcaggtcaacagaggaatccagcagcttcagcatcttgttgctacgttctacacttttggcacgttctgcaatatcagttcctgagagttctacacctgcagcatagatggaatccagaaagtcatccacgctggttccatattccatccggaactgggcttccatctgccgcacgactactttcaggctgtatgtggcatcacggtatctgcgcaggaatttgtaggtgtcatggaaacggggatcctcttcaggattcacaaaactgtggtttttctttgctcccatcttaaacacctccttccaggaccggacggtctgtttccggcacaattttggcaggctgatccttccggggaatgttcagctcaaaccggtatgcagtattctcatatgggcagataatacttagagtatatagattaactatatctttgcaggctgataatggagataatatatacctggtgtttgggcactcacagcacggaatcccctgtgttttcagcagttccgcgacttttttgatgataaatttcatgtgcgattccggaacgcaggaatcattttctgaaacggtgatctgactctctgtgactgtttctgatacgcagagttcctcctcgttttcggggatatggattggcagttgcatcttcatggcgatttcctccttgtcgatcatcacatcgctgatatcgaacatgacagacagatagtagttcagatagatcatggtgccgtgtttgcctttgaaggagagcagtgtgatgaggttctgttcttcaaattttttcaggatacgggagacggttgctttggaaaggctccagcggtctccaagtgactgaaagctggtgagcgggttgccggtattattgcggtagtatacgacaggggcagagtaggagccctgtacggatggatcattgtagatagcgtggatccataaatccaaaaggatatccatttcagagcatttcccaatactgatgaactcatggactcttgcaatcgggaaaaagaagaatccatcatcctttttgcagggacagttatattccaaaacggtattgtcctttggccagtccgtgattttaaatttcacgactttgtttttctcaagcagagaaaacgtgatacagttctggcctgccagatggttcaggatggaaatagcctggtgctggaagcggcagcggaaccatgcctgcaggtcggcaagcgtacagatccattcaccgggaccgaccagataggtgatgtgttccatccggcggtaagaggaacggtaatttgcataggagcagagtacgatgtaataaaaaagaaaagagcctccgtttgtgcggatgctcttgttggcgatcagggatcgaacaaaatctctgtaaattctgcaccgtgggaaatccacgatctgttttatttctaattgatattccatataatgtcctcacattctttgagtagtttgttgaaaaaggtattgaagtacctccggatgcggttgcgttcattagcatagccagatgtactcattgcatttttattgcattttcaattttgtttcattcttttcaaaactctcttaaagtgtcccaaagtggcttaaattcagtaatattgctttatatcgcgtactgtcggtctggaaaagtagtcggggatttttctatcatacctaaaaattaagcgcttactgtttttgcttttcttctttctctacagtagaaatatagctgctttttctcaatgcagtaactatgggcttatacagtaaaaatgtaatggatgcatttaatccgccttttaataagttgaagggaagaatggcaggaaacaataattctgcaacagcctctctaggatatcccatataaagcggtgtcactaaataattccacagtagcataataataaccgttatcagccatccagatgccagtccaattattgcaccagataaagtgtgcttttttttataaataacagatgccgtacacgcaaaagatagtgtttgtactatattcatgatacaacccaatattccggtatcacttactgttaacatttcgattgttgccacaataatagatacaatgcaggaagtcattggtccccaaataaaacctcctaaagtcacgacaacatcagacggatcatactttaaaaataaaataacaggtatcctgcctataaccattacaacataagtaatagcacataacataccgatagttgtgattttttttgttttagtgttcatgattgagtacctccatggtaaaaaaaattaacacccaaaagaaaatgtctttcaggtgctaatatcataattagaccacaaaatgagaagtacctcccatgatctgtggaaacctaaccatatcttctttcatccagactatactgttggttttggaattgcaccaaatcgtgcgttttacgctcgcggactttaccgccaatcgggaatttcaccctgccccgaagacacttttattctgttgttcttttcaaattataacatttcctattttggagaacaatggagtggaggaagttcggaaatatttcggaaacttgcattttacagaatgggatttacttggaatacaattaaattataacaatagaaggattcaattacacttacagttttgagagtaaacgaataacaaaagagccgcaatcatgcaggtcacaattctgtgaagcatttttacgaccctttacatacactctctaaagaaatacaattacgattttttacaaatagtcgtaggaaaccaattctttcatagaaatacgggtagtaacgtgacgttctgagtctgccggggtttcttttccatacccgatgactaatatattgattggttccaaattatctggcagttgaaattcttttttgattacatctggtttaaaaaagcatacccatacggttcccaaccctaattctgttgcctgaagcatcatatggtctgttaaaatggatgcatcaatatctccagtttgtttccggtcaaaaggacgtacccacgctttgttgtgatctgcacagacaatgattgctaatggggcattatagatatttgctgccatgcttatttttgcgagtgcttcatcgctttgggctacaattagatgaaccggttgaaggttggctgctgtcggggcaacatgggcagcctccagaattttatttaatttttccggctctactttctgatccgtatagctacggacagagaatcgtttctttgcagtttcaagtaattccataattttaaattcctctttctttatatatttgggagattatcaaatcaaccattgactatattgtaacaccaccagtataatctacaagaatgtactttcagggaagatagttcccaaaaggaaagtgcctggatctgaaaggagagaactattatgcagcggccacaagaaccatttaattgtcctgtagaagcgacattatctttgataggcgggaaatataaaccgcttattctttggcatttaatggataacccgcttcattacatggaattgcaacgacttattccaaaagcaacggctaaaatgctttcgcagcagcttcgtgatttggaaaacgatgggatggtactaagagaagttattcctgaaaaaccgcctaaaacaatctattctttaacatcttttggaaaaagtatcattcctgtattggaagcaatgtgcaattggggagaggggtatttggagagtttagatatacagaactcttgtgactcatccaagaaacagtgatcattaggagatgaaaccgtatgaataaaatcattgttattgaagatgatatagccatttgtggggatatggcatactcccagaagtgaaaaattgattcatcagaccagatgggaaaatatgcaggattttaagatgtttggaaatttcataagcatattaagattgaagaaattcgtggacttttatcgtcctaaatgtgtagacaggaggtatcttttctaccggtgttccgagtttttcttacagtgcatggctatttctggatatgagttatacgtcactttcttattcatattccttgccttgtattcttcgagcaaaagaaatataataagtcatattggtgggaaactatttggactacatgatgctgaaagaggcaagcaagaaatggggtatctctacccgaatgataaactattattgcaccgagggacgcgtccccggtgctgtaaaaatggctactgtctggctaatactaaaagaggcagaaaagccggttgactgacgaaataagaaaaagtgaaaggaggctcctctatatggcaaatattttgattgtggaagatgaaaagaatatgcagagcattattgtcgggtatatgcatcgaggcggccacacctgctttacggctgatgatggcgtggacgctttaatgatcttgaaaaacaatcccatggaattgatgatactggatgtgatgatgccccaccttgacggtttttccgtctgcaagatggcaagggaaatgagtaaccttcccattatcatgttgactgcgaaaagcgaggaagaagataaactgaaaggttatgagttgggagccgatgactatatcacaaaaccattcagtcctaaagtgttactggcaaaggtaggcgctttgctgcgccgatcctcgattacgcccaccgattctatgaatgccgggaaaattacgatcatccctacatcccacaaggtctttgtggacggacaggaaatcactttaacccataaggaatatgaactgctgcatttcttcatggcaaatcccagccagatattcagcagagagcagttgcttaatcggatttggggctacgattttgaaggaacgactcggacagtagatacccatatcaaaaccctgcgacagaaattgggcgatgagggcaagcacattgttaccctgatccgttccggctataagttcgaggtgagtgtatgaagatcaacgaaaacatgaacatctttaccatacgaaagaagatactgcttgcctccaagctgattggtgttgccttgattgtttcttatatactgtccaccaaactgccagtgaatgcagatatttcctttgtgatatggctggcatttgtggtagtgctgatctgcgccattgacctgttgatggcacgttttatcacaaagccagtttcagaactgaatgaggctgcgaaaaatctggcagagctggatttttccaaaccttgtaaggtaacaagcttggatgagtttggtgagctttcagaaagcctgaataagatggcggaaaatctgcagcaggcttttgtttcgttagaagatgccaatttgatgaccggaggggccggtgctgggaaaacgcacatcgcctgcgccttatgtatcacagcaatgcatcagaaccgtactgttaaatacatacgtgcgagcacactcttaaaggaatcagatcatgccaggcaggaaggtacttactttgagtattcgaatgaaatggccgcttatgatctcatggtgatagatgatttcggcttaatggatctggacatcgagaaatgccgcgatttatttgaaatcatcgagtccagagactgccgcaaggcaactattattatctcacagattccagtatccggatggtatcagctttttggggattccacctacgcagatgcctgcttaagtcgaatgacatctaaggcatatcgccttgaatttcctggcagggatcgcagaataaccaatagtaattaatcaacctgctgagctttgctcagtttgaagcggaatggcgctccgttcctctggaacggatgcgcagttcttgcggaatatgcaacaagtgccttcagattgggaaactactattaagagattagattttgggatggatgtctactgtcctgatttatctgactggctttcaagaaaagaagccagctatttgaatttataccatgcactggagagctattgtgaacagcaagaagaacctctgcatttatgtggtctttcattgggtggaatccttgctttgcattatgcattagaacatgcggagaaagtagcctctctggtattaattggtacgcaatatatcatgtcgaagcggttattgaaatttcagaatatgatatttcaccttatgccaagcaggagttttcgcaaaatgggctttgggaaaaaagattttatcagtctgtccaaatccatgatggatttagattttcaaaaagatttagaaaaaataaattgtcgggtacttgtgttatgtggcgaaaaggataaggcaaatatgtccgcagccatagaattaaaacagcagatcaatcatgctgaattagagattattcctcatgccggacatgagataaataaagataatccggttgaattaggaaagattctcagtgatttttatagatgtaaatgatgttaaattgaaaccggtggataagaatgtagaggttcagtgatgaatttgacgttggagggattctgtatatggacgagagagaaaagatgatccgattatggttttctatgtggctggaaaagaaggatttgggaattgatgatatttttgcagaaaacgtgatttataaagaaagttggggaccatgttatcgcaatcgtgaaacaataaaacattggttttcggaatggaatacgagaggaagcgtaatagcgtgggacatcaaacagttttttcacaaaggaaatcagacagctgttgaatggtattttaaaaatgtgatggataatggagacatcgaagaatttgatggaatctctttaattgaatggtcagcagagaataaaatacaatccttgaaggagttcggttgtaatcttcataactataatccgtatcaaaatagtgatatgcctcaatttagagaagaaaaaattaattggttctaaattttaagcaagcggtataaagtgatcttagtaagcgatgagaaggtgtgtggtgacatgcatcttcttttttgcgttacaaaagattttaagattttaaaaagaaaatcataattttttcgatatgtaacatttctaggacatttctgttgtaaaataagaatcaaaactatatcaaaattgtcgtaaaggatgaaaaaaatgaaacagattttaattgtagaagatgatgagcttttgaataaaatgttagtttacaacttacagtcagaatcctatgggattgtttctgtggaaacggtaaaagaagctatggaagtactaaaaagccagcagtttgatctggtactattggatattaaccttccggatggaaatggatatgcgattgcaaaaacaatccgagaaaaatatagtgataccattgtaatctttctgactgctaatgatagggaaagtgatgagatccgaggatatgaacttggagcagtagattatattacaaaacctttttcaatccattccttacagagaaaagtagaaaatgtactgcgtatgatgcggcatcatgtatctatgcaggacgtctttgatgatggcaggttgtttttaaattttgcagagcagacggctatgctaaacgggaaaccattaaccttatctaccttggaattccggatgctgaacctgttctgccagaaccgcaatcgtgtattaacaagaaaacagttgctagaaaaaatatgggactgtacagagaattatgtggacgagcatacgctaactacaacattaagccgtattcggggaaagattgaaacaaacggaacagtatatatcaaaaccgtatatggcatgggatataaatggaccggaggtgaacctgcatgataggaaagaaactttctgtaaaaaggatgtttttttggctaactgccggaatgacactcacaatgacagcgatcatattggtcgcattctttctgaccaaaaatattgtagtgttatgggttgggatggctttgatagtctgtgcaatactgtggatgctatttatggtacaactgttaggaatgagactgtcaaattttacttctgaattgtgtcagattcttgatgacatgatgaaccgtagtcaggaacccgaaaatgtatcagacagggaaacgatttttgcccgtattcatcatcgcctggtacgtctgtataacatcttgcaggaaagtaaccggtaggtagaagcagagaggcaggaattacagtcgttggtgtcagatatttcccatcaggtcaggactccggtaagcaacatgaagatgattgtggatacacttttgacaaaacctctggaagaacaggagaggaatgagtttcttaaaagtgtaagagggcagatcaataaactggattttttaatacaggcattagtcaaaacctcccgtttggaaaccggggtgattcaattagagaaagaagagcatttcttatatgatactttggctcaggctatgagtggaatcttatattctgcagaacaaaaaaagatccatgtatcggtggaatgtccggaagatctgtgcgtatcccatgacagtaaatggactgaagaagcgatttttaatctattggacaatgcagtaaaatatactccgacaggtggacatgtaaatgtgtcggtagcgcaatgggaaatgtatgtggaaataaaagtatccgatacaggaaaaggaatttcagaaagcaatcaggcatctattttcaagagattttaccgggaagaagagattcataatcagccgggtgttggaatcggtctttatctgaccagggaaattgtgacacagcagggaggttatgttactgtagaatcgcaggtgggaaagggatctgcattttctatttttctgccgagataaaggaaagaaatatatggagcttcctgtataataaaaaatgtggatgttgaaaattgaaaatacctcagagtacaataagactactgactggcaggttagtaaaaatcttattgaacagagaggtatctacaatgaagtctaacacacagaataaaaaaatagaagcaataactgaaaaaactttggtaatcggaatcgatgtaggaagtgaaacacattatgcaagggcgtttgactacagaggcattgagtattcaaagaaaccatttaagtttagtaacacagaggccggatttgtgacatttaaggaatggatcctggacctcaaagaaaaacatgagaaggataaggtggttccaggcatggaaccgacagggcactactggtttaatcttggaaagtatcttcaggataatgaaatgaaaccagtacttgtgaatccacatcatgtcaagaaatcaaaggaactcgacgacaataatccaactaagaatgatcgtaaggatccgaaagtgattgcaggtctggttagagagggacgatacatgatcccatatctgccggatggtgtttatgctgatctcagaacagcatcaaacataagattccagttacagtcggaacttacaagaatccaaaacaggatcagtcgttggttcaatatatattttcctgaatataagacggtatacggaaagccggatgccaagagcggaatgctgatccttaaggaggcaccactcccggaagatatcctgacgttgggtatcgatggagtggaccagatctggcgggatgcaaagatgagagcagttggaaaggcgagggcgaagaccctgatcgaagctgcggagcacagcgtcggaagcaaagaaggagcagtatctgcaagaatggagatccggatgcttcttgaggactatgaatccagaaatatgcgtctacaggaagttatggttctaattgaagaactggtaaaacagattccgatggctgaaaagctgctggaaatcaaaggtgtgggaatcaagacagtgtccggattccttgcagaagtaggtgatatcagtcgcttcaacagtccgaaagaactgcagaagcttgcaggattggcattggttgagaacagttccggaaagcacaagggagagacaacaataagcagacgaggtcgaaagagactcagatacctgctctttgaggttgcaatgtcgcttgtagcgaagaacccggagttcagggaactacataattattacacaaccagaaggctgaatccattgaagaaaatgcagtcacttatggcgattgcagccaagctgatacgagtcttttttgcgatgctgactaaaggtgtggattatgatccgaaaaaaatggtcagtgacatcaagagaccggcagtttatctacaggctgcataagaaagacaagtaactataatggaggctgtcacgtggacagccactgaattaagcagaatgtaacagataacgtccactgatcacagtgctggaacaggaagcgagtcagtaatcaataatacaaagaatgagccagtagtcggcaggaatattttccatagggcatgaccctgtaatggagcatagctgacaccctggttatgggcaggcaggacgaaggaagttaggacctctggagacagagatgatcctggtggatataggaggttagctgccatagagggatgggtatatacaaggccagtaaaacggaaatcaatgacgttttatttcgtataccctctaaccactatttcagtacctgatacatcgaaatgctcatagctgtggcttattcactgagatatgaaaggttgaaaaaccttgaattttcaatagaaaacacttgattatatgaggaggataatatgacagctgtaaaattgatttcacttacaaaagaatatcaaaatggagaaaattatataagagcagttgatgatgtatcattttccataaatgaaggagagtttattgcagttattggtgcttctggaagcggaaagtcaaccttgataaatttaatcagcggattggaaaagcccacccatggatgtgtttatgtgcatgatgtaaatttgacacaattatctttggaagaacagatttcttttcgcagatggcacattggagttatttttcaaaaatataatctgcttcctgccatgaatgtgtttgagaatattgtgcttccagcaaaattactagagaagaaagtagatgaaaaagaggttttccgtttggcaaaaatgctgggtattgaagacaaactctttcaggtgccggatgagttatctggagggcaacaacaaagagctgccattgctagagcagtctatacccatcctaccattcttttaggcgatgaattaacaggcaatttggactctggaacaagtatatctgttatgaggttgctaaaagaaatctgccgccagtataagcagaccttgctgattgttactcatgatgaaaatgttgctgctatggctgatcgtattatttgcatgaaagatggaaaggtcgtgaaagatgaaaacgtataattatcatctgcctgctgaaaaagtacttttagaatcgtacaagaaagaaaatagaagcaaaaaccgcctattatgtttggtagttatgtttgccgtcagcataatattttgtattttaagtttttcctatggaaaactgcaaattgatcttcaaaagaatattcgttcagatggaatggcagcatctgtctatatagagaatggtacagaagaaatggctcatcaattaaattctctgccttacatatccaaaaccggaaaacagaaattcgctgggaaactgttacagcaaaatcttaaatattgtgattgtgtggtagctgatgaaacgggatttcagaaaatactctgtcctgcctatacacagattattggtgattatccaaaaggggaacaggatattatgctttccacgaagaccctggaatatttgggaatcaaggagcctcaagttggaatgaagctgcagctggatttttattggaacgatatctttcatacagatggaaccggtcagcaggatttccggttatccggatattttacagaataccaaaatccagaggcggtttcttccattgcatttatatcagaaaagaaactggctaaaaacaaaatcatatggaatccctgcaggatattgattactacaaaagagaaggctgtcagcggaattcagatggagaggaaattaagtgaggagatacaactgagtgaaggacagagaattgttagtgttgattcagcagcatatcgtgcaattgagaaaaccatgggcagttatggatttgcactagtattatgctttttcctgttgctatgtatgtttttatttgtatctaatgttttgaatctttccatggaaaaggacttgcagcaatatgggcttttggaaacaattggagtgcagcccaaacagattgtgaaaataatggtccggcaaatgacagaaatggttctaaaaggcagcttggcgggaggacttatagggagcttcttagtgttgaatcttttaccttatatcctcaaaacaaggtatctggaacgggcaggggaatgggaagggatacgtttatttcatccatcttttcttttggtcggaatgttgcccgcagtcattacagtaggaattgctgttttcatcgtgaagcgaaagcttcaatcgttaagtcccttggaatgtatgaactacggatcaatttctttgaagaaaaaagagatttcaatcccatccagaaaacatcgaagttggggacattatccggaaacctatttggccagaagatatctgttccgtaataaaagagcctttctgatcactatgatttccttgactgtaggatgtggatttgcccttggtgcatctgttatggtgcggggtgtagatatagaaaaccgttttttgaaagaaccggattttaagatttccattactcaagaagcatgcagtacattgatggaaacttctccagatacaaaaaatatggttttctttccaaaagaattgttgcaagaaataagagaatgtgtgggagagtctctgcaaaacgaagtgcagatacagggattctatcccataataggtaaaaatggaagtaagagcatccgattgttacaaggtgcagaagaacacagtacagtgatacaaaaaatgaattccaaagataaagaaaaactacagtcatttgttaaaaagcagcagttaacggtggattgggagacctttgagcatggaaacggagcattgctgcttcatgaacatcaaatagcagagtcaaatgcagtacaagctgtaaagcaggtaggaacggaaatagaggtttatgatcttgttccagtcggaacagagatgacaaatctggttccagaaaaattagtaaattgcggatatgtagatatcatggatgaagagttcccggatctagatttatgttggaatgggaaaagtacgaatattctgcttgttacagaagaaacttatcaagcactttccccaaatttgacaccccaaaccttctctcttcaatttcatgtagatagtgaacaggaaaatgttctcaaagctcgtttcaaagaaatgatccgaaaacaaaacatgaaatttcagtcagagggcgggtatcctgaaaatctaaatctgtttcagataacatgtaaatcggatttgttaaggagagaacagaattacattcagacaagccgattattcttactggtgattagtggctgtctgatctttattggaatcatgaactttttgaacgtaagagtcacagaaattctaatcagaaaaaaagaatgtattcttctggaaaatgtgggaatgacgaaaaagcagttatatcgtatgtttttgtcagaaggcattgttacctggatggcactgagtgttctgctattaaccgttggtacaatattgctctgtgggattggatggtatatgaaaacaaagatttcttattttgttttttcttatccaatcaaagaaatggttgctctactgatgattttacttgcaggcagtattctggtaccagaaatcttatataaaaagttttatggaaaaacgaatattaaataatggagggatttgaatgatgtatcaaaccgtattaatagaagacattactactgaaaatgtaactgaaaaaataaatacaaaactcttggaaatggaaaaacaaagctacaaacttgtaaccatgtcatttctgggaactgaaaaagctgttttggttttcaaaaaaaggattaaaaggcagtttgctgtgatgttttaaatagaattttagtcacagataaaatcaagaacagcagaatatcatattttgtatcgtttgcaatttttttgaaatgtccgagatttgtaacaattcaggctgaaattccttgaattttgttccttttctcggacatttctgagacatttgtattttataatagagctatcataaagaaaggcagaaaggagtttataaaatatgagcattttacagacaatcgatttaaaaaaatattatggtacggaaccgaatattacaaaggcactggatggtgtaaatttttctgtggaagaaggagaatttgtagcggtagtaggaacttcaggttccggaaaatccacgatgcttcatatgatgggaggtctggacacgcctaccagcggaagagtcattgtacggggagaagaactggcaaagaaaaacgatgaagagctgacgattttcaggagaagaaatattggtttcattttccaaaattataatttggttccgattttaaatgtttatgaaaacattgtccttccggtagagttggatggagatacggtagatcaggggttcatggatgaggtggttcatatgctggctctggaagataaactaaagaatatgccgaataatctctctggaggacagcagcagagagttgcgattgcaagagctctggttgcgaaacctgccattgtgctggccgatgaacctacaggtaacctcgactcgaaaactagtgcagatgttatgggattgatcaaacggaccagttatgagtttcaccagacggttgtaatgattacacataataatgagatcgcccgacttgcagaccggattgttcgtattgaggatggaaagattgtaagttagggaggagatcatatgacatggccttttgagaatgataccagtgctatcacgaaaaaaattgctaaaaacgatatagataaaaaccgagttaaaaggttttctcgcttactacgatagtctttgcaacagcactactcatgatgttgattatgtttgaaagcggatatgaaactacaaaagatagaatggcagaagggcagccacaagttgttttttatgatctttcccagcagcaaattgagttgttgtattcagaggaaaatatcgaatccatcaaagtaactgaaacagaaaacgggtacgatgcttcaattaccattgttgatgccacaaaaatgacgcaatatggtttttcttctgcggtcgataatatatcttcaaaatatgacattcatcatgtaacaagaaacgacttattcatggatagtttgcccaacggaggactattaaatcagaaaaacatggttcttatgggggtggcaatcttcattataattgtgagtgctttagtaatttacaatgttttctatttatctgttgtaaatcaagtgcggcaatttgggcagcttcgtactgtcggaatgacacagcagcaaacaaagaaaatcatccgctacgaaagaaaaattttatgtagaattggggttccgattggtctactgattggcggccttgctggatatttgttgcaacctgatggttgggattggatcgctgcggtattctgggggataatcattagtcttatcatcaatttcgttgtaaaagtatcgttaaatagacctacaaaaatagccctcagcatttccccgatcctttccagcaaatatatgatggaacgctttgattgtaaggttactaacaaagaaaaacgaaaattatcttctttggggctagcaatcataagcataacatcacactggaaaagcattttagtttctgtgctttctttgggcctaagcgggcttttattcgtcttagctgcgacatacaccgcttccattgatccagagtctattgtaaagaaagatgtctaccagtatggacaatttgcgattgaaactactggtaaatacagcgagaaagtttcagagattgaaaacttcaaacaaaagataatggagtttccaaacattagcaatataaagcaagttgttgaaacagatattagttgggcagggaaaaatagcacaggcaaagatcaactttctattattaccgctaatgactttgcttctattcagcaattcagcgaatcaggcgatttggattaccaacagcttgttcaatctaaccagatcgttgctgtaaatggtgtagaaggtatttctaaaggcgatacagtagaatttacatttggggatggcacccaaaaaacttatacagtgggaggcatattagatggtgatctgtattcaaatacagcaatttatggcggctggtttttaatgcccactgaattgatagcagaaaattcggtttcttttaatgtttctattaggttgattgtaaaggcaaatgataccggattggaacacaccacaatatctttagagaaattagtggatatgtcagatggattaacactgacgactatgcaagaagcgattgcttcaaaagaagctactataaggcaggtaggaatatctatcataggcgtaacactatttttgctgctttttagtatcatcacttttgcaagcacaattattacaaatatagcaacaaaaaagcgggaatacgctatgcttcaatccatcggtatgacttggaaacaaacagaaaaaatggcactatgcgaaagttgtgtactggctgtagggagcctgatacttactctgatattgggaattattttagggcagatattgataaaaggcttgataagtgtagggattttctatttgtcatatacatttccattaacattgtttactgtatattgcattgtggtagttctgattattttgacgattactatttcagctttttacagtttacaaaaaactccgttggttgagagattacggattatagactaaagaagtagacccgactaatataaaaatgttcgagcgttgtagcattttttgctgtacttcttatattagtgcaggcactttactcaatatatgccatccgttatatgcggaaacaatctttagtagagcgaattaagataacagaataaggaggtggcagactatgacgtggccttttgaaaataatacaaatggaattgtcaagaatctggcgaagagaaatttaaaaagcgaaaaacgaagaaatatcatggtaataatatcagtagttttagccgcttttttaatcagtctttctggtttggttggagtctcactgatgcaaacagaaaagaagaaagtgatagatacttacgaggcaacttatgtacaggttgatgaagcacatatagaagagttaaaacaggtaccggaatttgcacgtgtgggagaatactatatgtatggagaggaagtttctacacagggatttaagggattttttgcttatacggataaggaaaccctgtatatggcgcattcccagatgaaattggcagatggagacttgccggaagagaaaaatgaaattgtggtaagtaaagaatggctttcaaaatttttcccagactgtcatataggtgattcagtcacattggatacggaaagtttttcaggtgagtatactatttcaggtattttagatacaacagggcaagagaaacaaaatatgtactcttttcttatctcaaaagagatgttggagtagtgcaagaagtatgaatccgatggatactttgcctatatacatttggataatgtagagcggttagacggagaacttattaaatcatacgttcaaaagatcaaagaggagttgcagatacctggagttggatttcatgatgcttatttccgttatatcgatggagaaatttccatggagaatgttttgttgcttatggcctttgccggtattgttttggtaggtggctgtgttgtaattcaaagtattttccgtatttccattattgataaaataaaaagttatggtcagctccggactgttggtgctaccaaaaagcagattatgcgtattgtaaaaaaagagggacactctttgggatggaagggtatgtctatcgggattttgcttggtttaggagtgacacttttgttatttcccaaaggcttttcccttcctggatatcttttagtgattggatgtacagtattgatctgttggacaatgatttgtctgtctatccgaaagcctgtgaaattagccgcagatatctcaccggttgaagcagttcgttttacttcgcatcaaaaaaagataaagaaccgaacaaagagaaaaaggattagttcccgttctctcggaatgctgaattttcgtagggattggaagaaaacagtcagtattgtgttttctctaagtttgggcgggattctgcttttggctgttagttctttgctgattctgcaatctccagaaaaactggcaagacagtattttaaaaatggggattataagatttatatggattcggataaggaacatattgatcttctcaaacagggaaatccattgaataaaaaattgaaacaggaaatcctggatattgatggagtggaagagattctggtcacaaggaaatcagcaggttttgaagccacttcccatggaattactgagcatggtacttgtgatatgatcaccaaagaaaatagggaacttctggcacaggctattgtagagggaagtatgcctgataacaatggcattttattgccatacgaatatcgtggttttgatgggaaagaaaaattgggagaaactatagaactttcattaggagagaaaacaattcctgtaaccatatctggtttttataatctggaaaaaattatttttgccagtggacatggttcaatcggagtggacggaccaatgatgtttttgccggaaaaactgtttcaggaattaataccagatgtaactaattttgattactcctgggacattgtctgtgattcggataaatcggaaaaagtgggaaaagctttggagaatcttgttgtttcgcatactgatactggtttagatacctttgaggatcgagtagatagttttgggtatatgaatgtagtatatggcataatgcaggtgatttcatggttcatctttttgtttggtgtgattaatcttatcaatacaacactttccaatcaatattcgcggagacaagaaaatagcgtgctgcgttcggttgggttagctccaaaacaattagcacaaatggctgtatgggaaggaatggggtatgtagttagcagtattttgcttatgcttgccattgggctaccaattactcttctggtatggagaaaatttagtatcagtgcttacgctggacgaatccttccttacgaatttccatggttgcagatgggagtatatgtagtagtacttgtgatagtagagttcattttatccgtttggacaatccgcaggcagaaaaaacaatccctgattgaacaaatgcgggtaatggaataagagaaaaatgcttttgctgaaaagtgtggaacattttggcaaaagcatttttttatggaaaacattttttcctgaaagaaaataggatataatcaatctaggttttgaaatgatattatcagaaaaacggtatttaggacatttctgtaatatttgaggtttaaaatagcgacaagtttagaagatgggaaaggaagaatctgtattgaggaaaattttgattgtagaagatgataaagtactaaataaaacactggcttataatcttactgcggatggttatgaagtaacttctgcatacagttttctggatgcagtagaacgattgaaagagagtgaatttgatatcgctctgttggatattaatctgccggatgggaacggtctgcatttatgtgatgaaatcagaggaagagggcagcatacctatattatgtttatcacagcaaatgataaagaaggcgatatgctgaaaggctatgaagccggatgcacagattatattacaaaaccattttcggtgatggttctctgtaaaaaggtagctgctgtttttgcaaatatggaattgcggacaccaaagcatgatgtatttgaggatgaagttttgaaaattgacttttccgagcagagtgcggtttttgaaggaaaggtgatagattttacaccaaaagaataccgtaccttatttttatttgtaaaaaatccgcacattatattaacaaagcggcaactgattgagaaactgtgggatattgatggggattttgtagatgagcatacgcttactactatcatcagccgaatccgcaagaagattgaaacagatgagcgaaaatatattaaaactgcttatggaatggggtatcaatggataggcggtgaatcacgatgaaattacagaatttatccaccagagcttttctgcggctaatcgttggaggtgcttcgctgacatcgattcttttgttgttcatcctgtatgccttcacaaaagatataaggatgatacttggtggtttcagcgtgatgatccttctgtttctatggggtgcagtctttttgcattatttccagaaaaaactatcggtatttacagatggactatgccgaacattagatgaaatgatggatagtaccgttcgtccgcaaataaattatgaagcagaaacattgttagcacgcatcagccatcgtctggaaaggttatatcatgtgatgcaggaaacccggcataaggtagaagacgaaaaagcagaattacagtctttggtatctgatatttcacatcagacaaaaacaccgatagcaaatctaaaaatgctcaatgacacgatgttgaccagaagaattacggatgagacacgtaaggaatttttacatgctactgccagtcagttagataaactggaatttttgattcagggaatggtgaaaacatcacgattagagacgggtgtgatcaccttggaaaagaaagaaacagctattgcggatacacttgtagatgcgatcaatggggttcttgctcctatggaaagaaagcatcttcatttatccgtaaactgtcctgaaaacttaacagtttcacatgacagtcgctggacctcagaagcattgtttaatcttttagacaatgcagtaaaatatactccggaaggcggtgacattcacgtagcagtacaggactgggagatgtatttggaaattgccgtaacggatacgggaagaggcattccggaaagtgtccaggcaactattttcaaacgattttatcgggaagaagctgtacatgatgtggatgggattggaataggattatatctggcgcgtgagattatcactatgcaaggtggctatattacagttgaatcagaggtgggaaaaggctcaactttctctatatttcttcctcaaagataatgaaacggcggtctgtttattcggactgcctttttttgaaaaaatttagaaaaaaagaattttaggacatttctgcaacatttgagagttaagataatggcgaaaggggggcaatgactatgacattaccatttgagaatgatactagcgtaataatcagaaaatatgcaaaaaaaagtataaaagaaagtaagagcaaaacgatattgtccgtattaaccataatgctatctgttgcattactatcaggatttattctttcagtggtcggaatggcaacagaaaccaaaagagggttgcagacaacaaaccatgcaatttattacaatatcaatcataagcaaattgaagaattgcggcgagacagcagaattgctgactcaagaatttttattcaagctggcaacacacaggttgacaattatttagtaattccagtttacattgaacagaatgacagtaatattgccgtagaagaaatcgtagagggacaataccccatcggtttatatgatgtagctgtggataaagcctatttatcacgattaggattaccagctgaattaggaactaaaattacagttcctttttatgatggaagttcagaaacttttactgtcgttggtcttacagacaatggatcaacagaacggacatattccttatactgttctgaagaatacgcccacacaggcaagcaatttgaaacttctgtaacggcgcttactgttcaattagcaaatactgctcaaatgtcatcagagaattttaaggagattgttcaaaaaatcgggactgattatggtgttacaccacagcattctgattataacgatggttttgcagcctctcttgaaccaaatcaagaaaatattatgattatcagtattttttcgattgcggttctattagtaagctatttggtaatttacagcattttttacatctatgttcaaaatcaggtaagagaatttggacagttgagaacaatgggagctacagcaaagcaaattaaaacgattttacgaacacagggaaaacttctttgcattttaggaacaattttaggacttatcattggtggaacggcggcctttttatttaaacctgacggctggagttgtcagaatactgcattagtaagtgtactgactttttgcatcgtatatgcaatggtatggctggctgtaagcaaacctgctaaaattgctggaagcgtatctccaattgaagctgcaaaaaatacggggtatcagtctacacagttatactctaaaaaactgcatagaaaaatcactccgttttcaatggctgttatgggatgttcacgcaatcggcgtaagataatgaccgttctttctttaggtgtagctggggttatgtttatgggcggtacaacattaatatcctctttggatatggagcgtttttcacgacagggattattggaatacggagaatttgaaattaacttgtccagaaatgcagtccgtaatgatcctcatggaacaacaggagttcagcttaacaatccattaaacgacgatctcattcggaatatcgcacagattgagggcgtaaaagaatttacagaatataaaactttagaggcaaaatttgaatacaataaggcttccagaaaggataaacttgttccattcacttctgaacaacaaaaaattttgaaacagtatctttctgctggcacgatagattatcaagctatgatcgaaaacaaggaaatactcgtgttgcgtaatgagtatgcagagtatgttttcgactggacgttccaagtgggtgataccgttagattccgttggtttgatgggcaatcatatcaggaaacagaatacaccatagccggtgaaatcagcgatgacatatttaaagatccaataggcggaaaactattcggaaaaacaggatttttcctattgcccgatcagctattgcagaaaatggtcgttcctaacttcaatttcactagccatcttttagtcggcattaacaatttttctctagagccagaagtccgggagaaaatgaatggcttggtagaaacgatccctactgttacaatggaaacactgcataacctttatcaggatagtgaagcaatgtaccaacgtacaagtcttgtcatttggggcttgagcggctttattatgttgtttgcagttattaatttgattaacacattgattgccacaacactttccagaaagcatgagttttcaactttgcgttcgattggcatggaaaaaaagcaattacaatggacgatacaatgggaggggattttactggctttttggaatattggtatcacattggctgtaggaacgcctgtcggttatagcattgtccgttacttaaatagtgtgggggatgatacatgggtatggaaattccctttcatttacatgggagcatatattataatttcaatttttcttccactaataatttctgcgattattattcgtattttgcagcaaaaatctattgtggaacaattaagggaaactacgtaaggattaaaattatgccgaaaggagtgaatggctatgactttaccatttgaaaatgatacaaatgcagttgtcaaaaaacttgccaaacaaaatattaaagcaaatcaccggacagcactttctattatgtctgccatattaattgcagctacttttatgtgtacattatgttctcttgtgcagagttattggaatcagagagtgcagcaggaaatttttgattcagggaattgggatgcacagatattagaagttcaggcaaatcagattgaacttatcaaaaagaatgaaaatatcaaagacgttatggtaaaaggaaataaccaaacattcctattatcgtttagagaaaatgatccttatcttttagtccaaaattgtgatgcaaaatattgggaatccatgcatgaaaaaaatttaattatacatggaagagttccagaggctccgggtgaaattgttgttgggaaaaaattttttgaggataatccttccttcaaaatcggtgataccgttgatttagaattaggtgaacggagaaaagataatagaattgttgatttcctgtccccacttcaagatggggaagtatttgtaaaaacagataatgtacagtataccattgttggagaaattgataggacagtttccagtgcatataatggttatcctgcatatggttggctcaatctggaagaaacgccaaaagatgctagtgtagttgtatatacccagacaaagaatccaaggaaaatctatgaaacagtccctcagattgcacaggctattggtttggaacaagatgaatatggtgaatatccatatcgttatcatacagctctgctcggaatgtatggaatttatgagccggggcacttctggagcagcgatttacctaaactttttctttcacttttgatagttgctgttgcttctatgacggtatttgcctatattatccgcggggccttttccatttctgctaagcgaaaaataaaggaacttggaatattaaaatcaataggtatgacgccaaaacagatacggaagctagttaaatatgaagcacgttggttatctttttttccaattgttatttctataggacttggtcatttgctttcttatggagtattgaccgcatattccaaattgacacgcgaagtaacaggaaatcagatttcagtttctttctcaccatggattgcaatcatttcaataatgctttcttttttaacagtgctcttagcagcatccggacctgcaagacaaatgggaaaaatacgtccaatagaagctataaaggagaattggaacaatgtttctttggaaaaatcagcaaaacatacctttttaaaaaggtgttttggatttttggggaaaatctcagctaactctcttatcgcaaataagaaattatttcggacctgtactgtaacattatgtttatgtatggtactcatgtttagttttctggctgttttttctgtttcagatgttaataatacgaaagcagaacatgataatccttttgatataaatattacattagaatctggtcagcggatagaaccggcgcttattcagaaattaaaagatcttccagacgtgaaagaacagacaacttatacgatggcaatgtgtgcaagttggctttcggagcaagaattgtctaaagaatttctttcatatggaggatttgatacgaaagcagctggagaatatgttgttaaacgtgatggcagatatagaattccttgtacattaattggtctggaacaggatacttataatgcttatctaaagaatgcaggaatttcctcccataattccagatcagctgttattgttaattcagttgcaaagaatccggatgctaggggttatgaagcaaaaaaagagcaggtgtcatatctggatataaaagaaggtcagaggttacaattaacggaaaagtttttagactctgttcaaggaaattatagttttgatattcaaatatcttctgtacttacagagatgccagacataggttttaatgttgctttttatactttgcctattattgtacctatggaagagtattatgagattataaaaaattttggggaagatcgtgcagtatataattatagaacctatatgaatcttcgtactgagcaagggaaagatgttacagtacaaagtcgagtggatcaactttgtggtgaatatttgagtaagaatgatttttttacttccagtaaaacacaaagagcagctgatagagataaactgacaaatgctacaatgttaattgtttatagtttgacagcactttttgggattgttggtatttcatcggcagtggcagctatattaaatagtttatatcaaagaaaaaaggagtttgctatgttgcgctctgtcggtcttgataaaaaagggctatgtcacttactttatacagaaggatttcttcttgtaatcaaacctttgttaataggaatctcaatactaattttagtcagtaccatattaatttggctacaggatataacagttatagaatttcttaaggtttttccgttctggggggtagtagtatatatcatactcacatttgccatcatcagaggaatctatatggtggcatcccggaaaattcgtagggatattattgttgaagttttaaaagatgaaaccgtttaggattataaaaaatgaaatacatcaaattaaaacatttttatgtagtttcatagagttttaggacatttctgcaacatttgcccgttactatatactcatcaaacaaagaaaggaagtagtgattatgacaattttacagacaaaggatttaaaaaaatattatggcacagaacctaatataactcgtgctttagatggtgtaaatttttctgttgagcagggagaatttgtagcagtagtagggacttcaggttccggaaaatccacgttgcttcacatgatgggaggattggatactccaacatcaggaagtgtagttgtggcagggaaggagctggctaaaatgaatgatgaacaacttactatttttcgcaggaggaatatcgggtttatcttccaaaattacaatctggttccgattttaaatgtttatgaaaacattgtccttccggtagagttagatggagataccgtagatcagaaatttatggatgaagttgttactatgctgggattggaagataagctgaaaagtatgcccaataatctttccggtggtcagcagcagagagtggcgattgcaagagccttggttgctaagcctgcaattgtgctggccgatgaacctacaggtaaccttgactctaaaaccagtgcggatgttttgggactgcttcagagaaccagtagagagttcgatcaaacgttagtaatgattacacataacaatgctattgcgcagcttgctgatcgtattgtgaggattgaagatggaaaaattgcaggataggggttgatttatatgacgctgccttttgaaaatgatacaaaaaccataataaagcgtatttcgagcaggaatatatcagcgagtcgaaaaagaaatatctttattattattacgattgcacttgcgagtacattattatctgcaattaccctttatggatttggaattacacagaaaacaaaaaatctaaataaaaaaacagcacagattgtatatcatgcaatttcagaaaaagagggttcggaattatacaaagaaaaagagattgcgtggattggagaatttttcaatgcattttctgaagaaataaaccattcaaccgtaaattttacttacgcaaatgcagatatgctaaaatctcaaagtatgccttattcgggaaagttaccaactgcggaagatgaaattgtagtacaggaatcttttttggacagtttggggtattcaacggaattaggacagacaattaaaataccattttctgacgggatgaatcatgatttcaggttgacaggaatcttaaatgttgaaaccggagatattggacgatatacagctattatatcgaaagaattagtgaaacaacagtatggaaataatacagttatagattattaccttggattaaaagacgctcaaaacatgagtgaagaagatgctacggaatatgcagacactcttgcaaaacaattacacatccccgatgataatgtgattgttcgctccacttattttaatgtgaagagcgaaaattctggaagtgaaatgctattttatttcgtgattggatttgtaacctttattggctccggcattgtgatctattccattttttatatttccgttgcaagcaatattcgtaactatggacagcttcgcacgattggaacaatgaaacggcagattaaaaaaatggtttaccgagaagggaagatacttgctgctgctggtatttccattggtttgattataggtaacgtaattggatattttctgattccggagggctggtactggctgacttctttatgtgtgacgattgggtgtgggctctttgcttttacaatggtaatactctctattcatactcctgtaaaaaaagctgccgcagtatctccaatggaggcgcttcgatattcggattataaaggaaagtcgaaagaaagttcggcgctgtaccgaaaaataacgcctgcatcacttgctaaaatgaatttgtccaggcaaaaaacaaaatctatattaaccatattttcactcgcatttggaggcgtgttagttgtattgatttcaacgatattagtttcctatgatggagttgcagaagcgcgtgggagggatttttcaaaaggcgaatttaatattaaccttaatgctaatcaatcctttgatactgcaaaagtttcgttgactaaattacaacaaaaaaatatgctgaatgaaaattttgtaaaaacaatcaaagctatcgatggtgttaccggaatcaagcggtggtattatacggacgcagaatatcgtgtaaatggaatttctggagattggattcagggatttagtcaagatgaacaatctgatttagaaaaaaatctcataaaaggaactgctgattatgatgaattgattgcggacaaaggaattatcctattacaagaacgtgcagatctcaatggaatggatgttgctttaggtgatacagtagaagttgattacgaaaatgtatccggtgatattatgacgaaaacttatactgtgaaaggaatagtaagcgattataattatacgggattcgataaatgttttactctcccggaacaacttataaatgagggaaccgggatggattgcacaggtactatttccgtaattacagacaatgataaattcgacaccattgaaacttcattaaatcagctgatagataaaaacagtgatttggttatggataccatagaagaaagcgtaaattattataatagaaatcagcaactagtataacgaatattaaataattgctatatcaaacggatgccgcttcctcttcactgatttcatccattttatatttccagtgataaatcacaggttcacgatttacttcatcaaaatacctgtaaattcgctcttccaattcctctttggtattgacacggattccacgaagcatctgccgggtcatcttactgaaaaaactttcaatcatgtttaaccatgagccatgtttcggagtaaacacaaatttaaaacgtccctttggcagcgtatccagaaagcgccgtgtttctttggaagtatgcgcggaatgattatccaggatgatccggattgtatcctgtgatggatattttttgtccagtatctttaaaaactcaataaaatcagaactcttgtgagtctcacttactaacgggatggcttctcctgtaagcagatcaatgcctgccagcaaagagagcgttccaagacgtttgtattctgcatcacgatatacctctccgtgttccggtgtcgggcgtaaatccggtgcagtattggagattgcctgaatacccggtttctcatcataggacaccgtaatcgtcaatttataatcgtctggaacaatgagatcaccattctcatcaaactgcatttcaatctgtttgtagaccagcaggacttcatgcatttttgattcaaaatcaggatccctcttttcgcagtaatatttgattttaaagggtttcatatcctgttccctgaggaatttctggatataaggtttcgtaactgttgaaagtcttggatatcccgcctcctctgcatgtttctgaatgtatttatggagagaagccaatgtccacagttcctgcgcataaccgagttctgccggtctctgacacgcaatactgatcatccatgccttcgcatcgtcggtgatttcggatggacgtccaggacgctgaacatcaaacagtgcagcatccacaccgcctttatgaaacttcgaaacacaaaggcgtaccgtggcagtgctgattgcaagtttatcagcaatttcctggaatgtcattccatcggctttatataaaagaatcctggcacgatccacgacttgtgcctgaatggttctcttttttgataatgatttaaggtaattcctgtcttcatctgacagaggaagatatgtttttctcatagcgatcatcctttctttgataacactattttaccatacatcatctcaaaaatatatagcataaatttaatttattctatactagatcctatgtgcggttcaggaaccagtggtgacgttgcatcaaatttagggatacaatgcgtacaatatgatctgaatcctgaattaacctgtggggttggtggatggaacgctttaaaggatgatgtaaaagacagtgcagatcttatatttttacatcccccatatcattccatcatacgatattccggtaatatgtggggaaagcctcatgcagatgacctgagccgatgcgaaaactatgaagattttattgaaaagctcaatcttgtgattaaaaaaatgtttttcagtctgcggtcgggaggtgcattagctcttttagtcggtgatatccgtcaaaagggcgaatttcattcgattgctaatgatgtcatgacaatgggcacaatgaaatcatggattgtaaaagctcagtttggatgttcatccagtggacagagctatcacagccggcatccgtttattccgattgtgacagagcatttgctgctgtttcagaaagaagatgtgtttcagataccatattcttttcgaaggggcggcattttttgtcttcggacacaggactccaaagctcttacctggtttcatcttatctgtgcagtcatggaagaatccggtggaatcctgtctttgtctcagctttatgaggagttaaaggaacatcctaaatcagcaaagaacaagcattataaggaacgtatccgcgccaccatctacgagcaccgaaatatatttcttacaaatcataagggcttatatcggctgagttatatgtagggaggtgcaggaatggcaaactgggatgaagacagtggttactattgtttgttgattgcaatcctttgtaatcttgatgtatatgaatctattctgatgtataagtatggcccggattatccactctgccagaaaatcctaaaaaagaaagtacggatagaaaacactgacaagatgacggataacgaagtaggtgcaatgatgtatcgacttagaaaagccggttatacgttggaagaaatatcaaatgcttttcattgctatccttctaccgtacggagacggatagaaagagaaaaaggaaaaaaagaggaaacatagaagatagcaggaggtggatgtatgcctgcaaaaatgcaagagagagggacaacgatagattcctgttctttggaaatctgggaacagaaactaaaaatactattgtatgcatgggaaaaagtttatacctatggagatgcagaaagtatgtgtacggatgggattgttctgaatagatatcgacaggaaatcttacacgcaaaaagtcatctggaaaaccttggaagcaaactttcttatacagttccaaagaaaatgcctgaaaaatatatggcacaggctgaaacaattcggacacaggcacagaaatcagcagaagattatttttcttcagatgattatcgatacctaatggcaaaattctcttatttgaataaaaagcagagaagtgagacaggagttacagaggtatatggtaaagtccaaagtcttttaaatgctgttgctgaagatgatctggttgtgatgcgtgaattgggaacacctggaatgttatgggaacaaatccaggagagtgcaaaaagagttcgatctatccccttcaaaataacaaaaacacctgaaaaggaagtaataaaaaaagaggacgattatcaagttcaaggacaattaagcatctacgaccttgaagcatcttaggaaggaggaaacgaatgacagatcagaaaaagatagcggcaattttcaatgattttatggcactttatcgaggaacatcccagataggaattcaagaaatctgtaagaagtatgagaaccatagaatgttaatcggacttcttgcaaatttggatgcagcgacatcaattccggttccaaaagtgatgaaagaatgctatgaaatttataaaaaatatcgggatcgcgaattagaaggaaaagactgggaagctgtagtagaagaaacacgtattctttctgaaaaatggaatgcaaatgcatggtgcgttcgtgttttgattgagttaatcggacttttggaggaagacgataaagaacgaagaagaattgcaaaagaagtagaaaaagaaatggaagaggcaatgcaaaatgatgcagcagcctgatatctaaatggagagtctttcggctctccgtttttataaaggaggattttatattgtttgaaaaaatgattcataatacagaggaattaaacgcaatggctgttcacttaaggctttcgcaaaatttttcggaattaaagtcactcgcagccaaatggctggttccggaagatcatatacaggactttatttcagggaaaagagctcaacttgcagagataccattggaagaaaaggaatattcttctgccgtcgagaaactaagagaagaaatgtggcttttaaaagatcagatgtttacagatatcgtttcccgttatctaattcaaaaagcagaagaaaatccggcgtttagtatgcaggtgcttcagaaacataaaactattcaaaaatgtatgaattatattatggaacaggcttacagtatagcacagaaggagcatgaaaagagagttaatgggaaacagcctgtaacaggaagagagcaaaatgtagcgcttggaatttctgaaattcaggtatatcaatgggctgaagattattatgcgttggatgatgctaaacaggaagcagataaaaaagaaaaagaacagaagaaaagaatctctaagcaaaagaaaagcgtacaacagaacggaaagaaaaagacttctgtgaaaacgtcacctacaattcctgcaaagaattcagctccggcaccagctaaaaagaaaaaagaagagaatatccagctttctatgtttgatatgatgcaactggataatgaatagaaaggaatgtacagatgaaagcatataagggatttcataaggatctgtcttgtttaggatacaaatttaaagagaatgcatggaataaaacggataaagctaattgcggagagaatggatttcattgtgcagaaaatccgctagattgtctgagttattatagaaactggagaaattccgtttattatgaagtagaagccgcaggtgatcttgatgaagatgaatttgacagtaaaatatcctgtacggagatatatctgctaaaacgactgactttagaacaattattgtttgaggcacttatttacatggtagaacatccagaacgtacttggaatgggcatgtaaaaaaagaatatgcagaagcccataacggttttgctgttgttcgaggaaaaaatccgaatgcacatggacagttaggagatattcttattcttttgaaagaagaggataattgttctgcaatagaagaagtggcatttttaaagatagacgggaaaaagtgttatccgggaatctgctatacggtaaaaggaatcgaaaatcatcaggaggagatttgtgcatgaagaaaaaatttttagtaactcttactccacctaaattaacaaaacagttgaaggaggagattgaaaaggatgttcccattgttagccaaaaactatggggaaaaagaaaagcatataaatataacagctatataaaggcaaaagttgaaaaagggtatttgatcctttctatttttaaaactgaatttgtacgttcgggttcaaaatatccaacgtatgttgtttattttaatagaaagtctgaagaatatatatcatttgaaactgagataggcaaatggagaacagcgatgttaaacaatctggatacagatttctcgtactattcttctcaacactatatctctgaaaaggatgggataaaaatccaaaagtacttgaagatagaacgtggtaattttttggcaatatgcgactatcaatcatctgttttagaaaaacaccgggataagcaatacaaacgtataacagatgaatgggataggatgttaaaacctgtgcgcagccttccaaaagactggaaaaaatgggttctccgcaaggcaatctcggaacattatatattttatcagtataagagaagcggtccgacagatggctattgcacttgttgtggcaaaaaggttgtgatagaaaaaccaaaatataacgaaaaaggtgtctgtccgaattgtggtcagaaggtgcagtttaaatctatcggaaaattcggaccgatttggacaaaacaagaaacggcgtatttacttcaacgctgctatccaggttttattataagggaattttcggtacgcatggctataggaaaaaatagttatcaaaatccagtagcaatctgttctgaaaaaaatcgctatctatatgacatggattttaaagaaacacctttttattttggagattataagcatcgtggtaatcgttggatacgtggagaaactcacagtaacaactattggtactattattatagttatgtagataatagttctggagccgtatatgcaaggacaattccggatctctctaaaaaggaactaaaaatgaccggtcttcctgaaatattaaaggggaaaagttattttcagccacgagattatttgcgctcattaagaaaagcacccatattggagcaactggttaaggcaaagctaaaaacgctatcttatgaagttctggaaaatccactgaaaatatcttcttttcaagatcatggtgctttgcattcgcggcttggaatcaacaaagatgcattgaagcgtcttcgaaagaatgatggaaatatgaaatatcttacgtggcttcaagaagaaaatcgctcaccacattatctggatgatgaattaattttttggtatatggaaaatcacatagaacccaatgagttaaactttattcattcgaaaatgagttatgttcagatcagaaattatctcattcgtcagaagggaaaaagaaaagacagtatttctcaagttctcacaacatggaaagactacatttctatggcaaaacgtgtgaaaatgaatatcaatgatgagattgtttatcgggcaacgaaactatataaacgacacaatgatctaatcaaatatattgaggataatcagttatctgtaacagcaggagaactggctgataaatatccgaatataaatagtgtactttctggtttgagggagaaatacgaatacagcgacgaaacgtttactattttagcacctcggtgtattgaagatattttaaaagagggacaggcacttcatcattgtattgataagaaaacagaatatctggaacgtatcaatgagcaggaaacttatattttgtttttgagaaatacgaaacagcctgacacgccgtactataccctggaagtagaaccaggcggagtcattcggcagaaacggacagaatatgaccgacagaataaagatattgaagcagcttcagcttttttaagagagtggcagcaggaaattcagaaaaggattactgaaaatgacagagagcttgcgaaccgaagtcggcagctccgaatagaatcctatgcagaaatgcgtaaaaagaaagtcaaaattaatggcggattatttcaaggaaaatatctggcagacgttttggaagcagatcttatggaaatgccggatactcttcaacaggcagcataagctggaaaggaggactatgaataataatatagatatgacaggaaaagaacatcttcttgaattatggtcggaaagaaaaaatatgcaacaggtaattcatgagcttattcaaaattctgaaaccggtgtggttgcgtatgacaagttctataaagaattagaagcaagatataatacttcttttcccaaaagcaatgaggatatgattctaaaaggcattttagataatgtgctatggaacatggttggtaacaaagaactttgtgaacatattacggaaaatgggaaactatacttttatccggaatgtgatacacaaatgacggaaaacaatgccgcatagaaagaggggttatatgagtaaaaaagaaagcatgttgtttgagttgatggaaacctgcaattttcttgatgtgttcgagcattgtttagaagcaccggattctttacagtcagggcaacatccagatgcccaaataggacatattcgtgcatactggaatggagacggatggcatggaaactattttccctgtagaggtgagctttggacgaaagcatttaaccgagaatcacaggatatttatcgttgtctggtgacgcagttttataatctggaaatattaagagaattttgtaagggacatccatcttcgcatgtaggtgaaaatgagtataatttttttatgaatggtcacgtagcagactactggattagatttataacaagagcgaatgattataacctgtacctaaaaggctataagaaaaactgtcagcatacataaagctatggaaatatgatgaggtgtaaaaaggaaagataaaattctttcctttttacacaaagtagcaaatgtgacaatgtaagggtgaaaaggatggaagaatttgacaggattatagagtttgcaataagaacagatgtagaactatatacagcaatgccttcaggctggaaaaagattaccggttcaatgactgcgccgcgtgggagtacttggatctacaatggaaaatcatatttttcaaggcaaaggaaaacagcgcttttggtagaaaaagaatgtttgaaataggatttaaaaatgaggtggatagtattgaagaaaaaggaaggatattttcagcagtcaaatggtcagcttgctctgttccagccggatttcattcgggatgcagattgtaccaaagagactccagttatatatggaaaatcggatattccgatatatggaactggtaaaagaattcacccacgagtttctggaaggaaagacacagagtatatgaaaaaaatgtatcttgaagaattactgcctttggaaatgtatgatttggttatagttttaatatccggcggtaaggacagcattgcctgttattacaaactattggagttaggcgtacccaaatccaaaatcgagttttggcatcatgatgtagacggtggacacccctcacgaactatggattggagatgtactgcaaattatatacgttcatttgccgaagcagaacagattccacttcgggtatcttggaggaaaaatggatttttcggagagttgtatcgtattggggcgtcggaattaattgaatgggtagatccagagacaggggaaatttatcaatgtcctccatcaaaaaagtatatggaatgtcaaaagttaaaagtggcagcaatatcagaaatggaaaataaactggcggaattcggttatcgaatgaaatttccaatgaaaagtggagatttgagccggcgctggtgttctgcttatctaaaaatcatggtagcggataccgttttgcgaaacatgaacagtgtggctgctaatttaacaaagacacgaaagaatataaaattattaattgtatcgggggaaaggcgtggtgaatccgtaggtagaagcaaatataatgaaatagaaattcaccgtaccaatgcagtttccaaacaccaccgtactgtacaccaatggcgtccggttattgattacagtgaaagagatatttgggaagtgcggaagcggcataaagtaaacccacatccttgttatcgggctggttggaaccgctgtagttgtgcaatgtgtattttctctacgccccgattatttgctggaatcagggaactgtatccgaaagaatatgctcttttatgccaggatgaaaaagttcttggatttacgctggacaaccattgcgatctggaaacatatatcggtagtgcggactcatgtgtatatcatggcgataaagaagcgattcaaagtctgcttacgggtgagtttccagtcgagtctgtttatgtgaacggcaaatggaaatacccggcaggagcttttcatggtgcagcaggaggaccttgttaatctgataggaggagattacaaatgaaaacggtaaaagaaataacacaggaaaccgtagattctttcattgaaacgatgagtttgacaatcttttatgaaaaagtggcagatgaattgcagacaacagcaccagaaggttatggatttgactgccggaagataagtatttcaaatgaaattcaggagcagtggatacagcagtttgaggaaaagctgggaaaagagcatcttccagaattgttcagaatgttgttacttgctggaccaaaggtggaacatcaactgaaagcaaacgaaatagctactgaagagaattggatttgcaaaatggattagggttattactttcattacgaaaaaagagaataggagtttgatatgacagatgaagaaagaatgttttcctgccaacaggaaatccgaagacttaggggtgttgtgcgggaatatgaagaaaaaagaagagtgtttcttgaatggctggaagaggaaagtaaaataccatctgaaaaccaggctggattgaatgtggtgaaacagtatttgaatacatgtttatattaaaaggtcttaaatagagataccttttaggcattattctgacagacggatattttgtagtagaaagaagaggtaaatatggaaagatatgatgcaaggaaagaaacttttgaagaaatagaaatttttgatactttggcacttttctgttcgggaagaattcaaagagaaagtgttccaaaaggcttttactgttatgaagtgcgacatgatgatgagtgcatggggatcccatgtgaattaagttctcatgttttagtaaatttttggggaacagtaatatctaaagtatcgctcattaataatggggaagataggagatatataggaactgatgactggggatatacggaaaatactgaaatacaattgaaatcatggcttgggtacaacatgtaaacttaaaaatatcaggcaatttaataaggcgcaaagctgttttattgaattgccataaaattacgttttatagatacatttggatttgttgtagtgaattttatgtaaaatgagcggtctggcaaaaatgctggaccgtttttttatttatttacagaaaaaggagagtggtgaactttttatttgttagaaacaacttcgggtaaatagttgtttttgtatgtccggtaatagactttttgtttctataacacaaaatgggcttacgagaaattatagtataagactccttttaataaaaaacatataaaacgagaaacttggaaaggaggacaagtggaaaataaaacagtaaaaaaagtctatgaggtagaagaaatacaaaatattttgggaatcagcagaagtgccgcatatgaactgattagagaaacctataaaatgcagcatccttttaaagtcttgaaaataggaaatctatatagagttcctaaagtaccttttgataactggttgaacggagagacagaatgatctttagccggacatacgtttctgttgacgtaaattttatcattttgataaggtttcattgaggtatttaagtcatcacatgaggaggcttatatatgaacaacgatattataggaaaagaggttgtgttttatgaaaataatacatggaatcatattataaaagaaatcaatctttatacttatacaatagaatatgaaataaaaagcggtttttccgacaaagagcaggctgaacaaagttattttttcttcaatgagaagtttcaaaaagatatagagcgaataaaaagactaaccaatattcaatatacttttacggaatatctggatttttggatgaaaaacttatatttgccatatagtgatagttctgccaaagttggctattcatggaccatctatcagatcattttacctaaagtaaaacgagatgttttattaggcatggttaccacgaagtttttagacgacctgattgatgaatgtgatggatattcaaaataaagtcattcatttggcattaactgatgcattaaatgacggatatttaaaaaatgatccactaccaggagttaaaaaacgatattggaattcccctaaaattacgattctaaccaaggcacaagttaagatctttcttgctgcagcaaaggaataccattccatctatttagaggtgttgctagcactgttttgcggtcttagaaaaggggaaataatgggattaaaatacaaagattttgattttttgcaacacacagtatccataaatcgacaaataacacgtgattacgatgtagttattgaagaggatcgtacatacaaaatcgctactcaaagattatccaccaaaccgccaaaatcttatagcagctatcgaacattgatcatttcagcttttatttttgatgaattggaaataaggaaaaaggaaaatgaagaaattctcaaacttacagaaaatcatgaatgggctgaatatatctgtcttggcataaagggaaatataaagtcagatggaacttacactgaagcaataaaaagaatttgcaaacgcaatggacttccacacattacaatgcatgggcttcgtcatatgtttgctacgatactgatcgagcagggtgtttcattggaaaagatatcaaaattaatgggacataaaagtgtagctacaacatttgaaatctattgtggaatcatggaagcgaagaaagaaatagcaaaaactattgattctgtaatggatccggcaattgatgccgtcaaagttcgcagcaaaggagggatagtatgcatgtaaaacctatcataaaacctccggtcagtgaaactttcttctacggtaaaattatttcatggaaattcagtgatagtgtaacttatgtcaaagctcggaaaaaatactgttttcgttttgaaattgtttttgaatcgggaaaagtttgtccaatgcaaagagggggatttgtttctaaaacagaagcgataaaagcaagagaaaatacaatcaaacaacttcacgaaaaaacatttgtgccatttgaatatacagccagagaattttttgattattggctttactattatatgattgatgaagctgatattgcttataacacctatacggcatatcggaatatcatatataattattttctggtagtctggggggataaaaaaatcacagctatacaaagagatgatttgattgcagcgctcgatagcatcccctacgactccgtattgagaagtgcatatggcgttattggtggatcgtttcaatacgcattggaaaatcatattatctatttgaatcctgtaaaatctgcaataaaagtaaaacgaaaaacagagaaaaaatgtgaaatagagaataataagaaggaagaacatgttgatcagcctccagctttaccggcagtatatacacttcagcaggttacgataatgttatacctatgcaaacaagaagaacctaaaatttttatagcattattattggcactgacagccggcttacgcatatcagaaattattgcaataaaatatgaagatattgatttcggtaatcatgaagtttatattgaacatcagttaggaagaagcacaaaaaacgaaggattggaagatggtaaacttcttacccaggaactacggacaaaaaccaaaaacagtgtccgaggaaccccgctggctgactttgttattgatgaaattatacttcaaagacaaaaatatgaagaattacgtgcaaatatcccagattttcatgactatggatatctgtgttgtcaagacgatggcaaaccataccatcggggttttgctcaggatgcatatacaagattaatggaaaaatgtggttttacaaaaataccttggagaaaactacgcaatacatacgcaacaattctggcggaatttgaaataagcatgaaggctattgctgcaagcttagggcattattcagccgattttactcaagaaatatatgttaatacggaaagagttgtatacaatgccgactgcgaaataatcgcctttgctctagaagttttgcctaagaataacgccgcacaattgattccgcttgacgaaagatatttgcttgaagttcttccctaaaatgtatataatggtgtagattggatgagtcaatcacatagcagatgcttctgtaatgttgtatcgtgttgtataattatgcatggtgttttccagtgataaatagtaagggaaatatgagaaaaatgaccaaaccggatttttgagcgaaaaacacgtaaaatcaataaaatttacatacgaaaaacaacataaaaaatatcgatttttcaccttgaaaagtcaaaaacaggttcgaaagaatttgtgaaatatatacaaaaacagaaaggaaatatatgagaaaacttgcattaaatgatgaaatattactaaaaatcgagaaacccgcccggtatatcgggaatgaagtcaatagtgtcatgaaagacccggaaaaagtggatattaggttcgctatgtgttttccggacgtttctgaagtgctataatgtagcagtgctaaagaacaatatatagtgttgttctgtgatttgaagtactagatgtatggattggatgaaactaaacgaaactgaaaatgaaagaatgatattgttacgaaattgaatttgttacgcaaaaatggtaatttggagtgaatatcattcagaataattaaatataaatgcaagggttatatgttttcttttgtcgagagaaattaaagggttggagtcacatcatgggcttcagcctttttgttttctattaagtatgctagagaacaaaatcatttgtgctggagtataacaatgaagttatattatggtcaaatgatatttagaccaataaaaagtaataaaatgtttaaaaagtaataaaatgtgttataattagagtaattaatatttggaggtgctaatatgagactaaaagcagaaaatgtatttaaacctggagcgtatccggaatatacatatgtctccaggaattatgaaaatacaggtatatcatatgaattgcgtttaaagcaggcattgagaacagcgggttgccttacatcattaattggaccatcaaaaatgggaaagacaatcttatgcgagaaggtaattggatttgacaacattgttgaaatttctggtgcggattttaacagcaacacagatttttgggcaattgttgctgcaaaagtggggttgccttataaaggagaattgacaacagaaagagaggttaatgaaggaaatagtaaggaaacagatagtaaaagtgaaaagtatgttctagcgaaagataccgttattcaatattataaagagcacgataaagtattagtaattgatgattttcattatgcttcaaaagagatgcagacaaaaatggcacaacagctcaaagatgcaattagaagagaattaaaggtagtcgtagtttctcttccgcatagggcagacgatgcaattcgacagaatgcagatttatcgggaagattgagtttaattaatattgaagcgtgggaaaaaaaggatttaaaagagattgctttaaaaggatttaaacaacttgacattaagataacagatgaagttgcagaacagttggcagttgaatgccttacatcaccacagttaatgcagtatatttgtctgagcatttgcacattgttggaagacaaaaatgagcatattgtaaattttgatatgttggaaatggcatataaatttacaacggttaactttaactattacgatgtggtaaatgtaatgtctaaaggtccaaatccgcgtggaaagaaaagaaatttatacaaaacattagatggaaaagaattggatttgtatggactgatcgtggaatcgttagccaaaaatcctccgattatggaattagattttgacacagtttatgacagaatcataaaccttattcctaaaacagaaggaaaaccggatagaaattctgtaaaaagtcatttaaataatttacaaacaatcctaaaagaaaaagaagaaatttataaagcaatagaatggaaagacggaaaagtgtatgttttggatccattatttttgttttatctgagatgggggagaatgaatggataatatgctgaaagagtatatcgaaaagttgaaattagtggatactgtagaggaatatgaggaatttatatcgaagctgcaccagatgatgaaacaagaaacatataagaatgatattgttcaaaatatcaggaataagcagaaatatatggtaaacaaattttcgaaagaatctacccgtgaaaatatgttaaaagcaaaagaaaatctgttaatctatttggatagtattttgtgtgaagagtatgagaaatcatcacaatttattcaaagggagcttgagagatttctgaggaatttttatttctttttagaagcgtttagggaagcaaaaccggataagagagcatcacttaccacagaaaatttgcaaaaaatacagattgaaaatgaatatgatttacagcatttgctttatgcagttataaaaccactatgtccagacgccagaagagaggtaaatgatgattcgggagttggaacagttagaagcgatataaaaattctttctttaaatacaatcatagaagcaaagtgtacaagaacatcaacaaacttaaaaaagctgacagaagaaatagaagctgatattgtacattataaggcggattatatattcttttatatctacgacaaagaaaaaattataaaagacaggcatgcttttgaaacaaattttaacaggagttttgatggaaaggaaatcaggattattattttgcaacctgtcaatatgtaaaggataaatttgacgggacagagttgggtgagaaaaggctcagtgtcagcaaaagatgagaaaaatgaggtgataatatgattgcaccaagaaaagtaaaatttgaagcgaagaaaaagggaaatgaaaatattgaattccgtacatttttaaaatgtaatgcagatgaaaaagaattggacgagcagttcaaaaaacttcacgaagagttgtttgcaaaatatgactgcagcagatgtaggaactgttgtaagatgtactgcggaagtattccagaagaagatttggagaaagatgcagaatatttgggaattacgaaagaagagcttataaagtcttatttgataaaaaaagaaagtgaaaacatatatgtaaccaagcatcatccatgtgattttctgaaaaaagacggaaattgtaagctgggagaatataaacctgaaaattgcaggaaatatccatatacggatcagccagagaggttacatagtttgtacagtgtattggaaacagtagaagtctgtccgatcgcatttgaaatatatgagagattaaaagaagaatatggatttcgttatagaagataagttactatagatagggagcagaaatgtttttaagagaatatttgacaaaatatacaaaagaagaactgttagatcaggcaaggagttttgaaatcaaaaagtgctcgggacttcgaaaagctgatttaatagatagaattgttgatactttttgtgccgaggaaatgcttagaagcagattggcatgccttacaaaagaacagatggacttatttcggaaagcttgtatttcccctaccgctgtttctgtaaatgaagtggtagatgcgatgcagctttacagatattggattggatattttgaaaatccaactgatagattttgcgtatttgaagatgttgctgttgccttttctaaaatagatgataaagcatttcaattgaagcaatgcagaaaaggctggctggtaaagtgcatacatttctttatacaatattatggaatagcaccaatcgaagttatctatgaaatgtataggcagaaagtgaaggactctatagatgaaatgatagaaatactgtgggaaatgccggttgatattgtggaatcgtgtctttttacaatggataaacttgggatggaaggatggccaaaagagaacccgttatactcagaaaaaggaatatttgttcacttacagttgtttgaaaatgaagaatttgcttacttgcttcgacaacagatggataaagatttttatattccatcggcacagcagatagatgagatatgtagaactggatatgaggcaagttcctctgaatataaaaagttggaatcttttttcattaagaaattaaggcttccttatgaacaggcagtgacatggtgtctgcaagtatgggcaaatagttatgaaggcgaatcaccatcaaaaattattaataaaatgacggaagtcaatattgtatttgaagaaaaaatgataaatgaattgctagagttacttgtggcggcacataacaatactcgaatgaaagagaacagagggtacaaaccaagtgaaatagcaagaaaaatgcctatcgataaaatgccaacaattgttccggcaagttctaaagcagcagcaattttaaaggatgccgcaccacagttgcaggctatgggggtgccggttgacttaaatagaaatacagatgttattcaaacaacaatgtttccgagagggctgaacgaggaaccaatacgagtagaaaagaaaatatatccaaatgatccgtgtccatgtggttcaggaaagaaatataaaaaatgttgtggaaagaataattgatgctaagaaagtttttggaccagttacgagcgtggaatattttgtgtcatacttatttataaggcagaaaatgagtggtattgagagctgttttgttcgtttttaaactgtttctgtggactgtagggacagaaaatactagtataacgaatattaaataattgctatatcaaacggatgccgcttcctcttcactgatttcatccattttatatttccagtgataaatcacaggttcacgatttacttcatcaaaatacctgtaaattcgctcttccaattcctctttggtattgacacggattccacgaagcatctgccgggtcatcttactgaaaaaactttcaatcatgtttaaccatgagccatgtttcggagtaaacacaaatttaaaacgtccctttggcagcgtatccagaaagcgccgtgtttctttggaagtatgcgcggaatgattatccaggatgatccggattgtatcctgtgatggatattttttgtccagtatctttaaaaactcaataaaatcagaactcttgtgagtctcacttactaacgggatggcttctcctgtaagcagatcaatgcctgccagcaaagagagcgttccaagacgtttgtattctgcatcacgatatacctctccgtgttccggtgtcgggcgtaaatccggtgcagtattggagattgcctgaatacccggtttctcatcataggacaccgtaatcgtcaatttataatcgtctggaacaatgagatcaccattctcatcaaactgcatttcaatctgtttgtagaccagcaggacttcatgcatttttgattcaaaatcaggatccctcttttcgcagtaatatttgattttaaagggtttcatatcctgttccctgaggaatttctggatataaggtttcgtaactgttgaaagtcttggatatcccgcctcctctgcatgtttctgaatgtatttatggagagaagccaatgtccacagttcctgcgcataaccgagttctgccggtctctgacacgcaatactgatcatccatgccttcgcatcgtcggtgatttcggatggacgtccaggacgctgaacatcaaacagtgcagcatccacaccgcctttatgaaacttcgaaacacaaaggcgtaccgtggcagtgctgattgcaagtttatcagcaatttcctggaatgtcattccatcggctttatataaaagaatcctggcacgatccacgacttgtgcctgaatggttctcttttttgataatgatttaaggtaattcctgtcttcatctgacagaggaagatatgtttttctcatagcgatcatcctttctttgataacactattttaccatacatcatctcaaaaatatatagcataaatttaatttattctatactagatggaataataaaaatagatggacgggtgatccgattcgtacatagagatgattatttttgtattcgtcagagggtcttgagaagaaaataggagatttttaaggtgcagttgcaatttagtatcatgaaaattgagttgagagtgtgtttataattatgcatgggaatggaaaacactatgaaaaatggaagaaaacgaaaaagaaaaaaagagatatctagtcacgggagcagaataaattgtatcaaagtgattttgatagagtctgtttgaataaaaatttatttgaataaaggagcaacataatgatagaatttagacaaacgtctactgcttttgctaatagaaaaccgcgccacagcctatagcagaccattgcgcagcgatttggttcattttgaatttttgaaaaaccgtttttcagctctggtaaatttcggaacttattttagcgcaataaaaggagaaaataatctgtgagtgtacttacgagaacggaacttgaaaaattatcggtcatgtatgagggagataaaaatagagatgctacgagtaaaattcggggttttttatttcaggactatgttgcgattatgagtcttcttaaaaaccaagtaaagtatatctgtttagaatacttagaggatgatacatttgagattattcaggtaaagtattatccaaagacaagtccgaaaatgaaggaaatttcaacagatctttactatcagtatcttcgtcttcagatgcttcagagcacattgaatgatttttcaattgaaatgacaaagacattagaaagagaggtgtctattatgtgtaatttgagtaaaggcgttgaagaaaaaggaattgagaaaggaattcttctttcaattagaaaccttatggaaacaatggggtggtcggtagaacaggcaatggaaggtctgaaaattcctgaagaagaaaaaacgaaatatttagatgaacttcacaataaatattatggagtggtaacaatgaataataatcgtcctacttttaatgagataaaatcatacgatgaatttgttaaatattattggtatcgtgatgaattatcaaaaatatgtaaacagcttggtattgataatacaggaacaaaacaagaattaaatcaaaatattaaggaatattttaatggtaacttaatcaagaaaaaaaagagccgttctcgaacaaacttgatagcagaagttacattaaatagtcctttacttgactgtggattttcattcaatacaaagtttagagaatttttttcacaacaaaccggagttgataatttcaagtttacagcagatatggcaacagcatggcgaaaggtaaaaaaagagaatgatacgtcttttacaattcaagatatgctgaacgtctactattgtaaatcagattatgcaaaatatgataattccacttgcgaatggaataaattcttaaaagatttttgtgctgatgaaagaaacactcaatttaaaaacaaattaaaagttgcgtctatcctttggaagatagttagggactcggatttaccaaaggtttatacttatgatttggtaataaaatatctaaaaacagtgtgaaattataaaatataaattgtaatagaggcagttagtcttaggattgactgctttttaacaaaagacaccatgtaggtcaatggtgtctttttagtgttgttttattatcatatcaaggctcattcaatcgtggtaaattcgtggtaaaatgaatagttttcgtaagcgcttaaatcttgggtagctttactgtctacgtttttgaactcataatgatagcaaatagatttttactacactccgcttgataggagatagaaatttactatatttggaggtttcattatgagtaataaacgtgctccaggacgttccctggacgaatggatggaactggtcaccgaatgcagacaaagtggcctgacagatgctgcatggtgtaatgaacatgggatatctcccagctgtttttacaatgcagttacccgtctccgcaaaaaagcctgtcagataccggatccagttggaaaagccagcactcttgaccttacgtcccataaacaggatgtagtccagattgctatagaaccggagtattctccggcaggactgattccagataatggaaacagtcctatgcaccttgacaattcacatacgattgaaatcgaagcagacggattgcttatacgaatgagtaatgagatcaaaccggtacttctgaagatgcttatggatacgctgaaggagtcattatgttagcggacatctcaagtgttgatgcgatctatatcgtctgtggcagaacagatatgcgcaagtccattgatggattatgtgcgatcatccaggaacagttttcgatggagatcgaccatgcactttttcttttctgcggtcgtaaatgcgaccgtatcaaagctattttaaaagaacctgacgggatcgttatgatctacaaaagactgaccgcccagggatcttaccggtggcccaggaataaatctgaggtccggaatcttacatggcgggagttcgactggctgatgtctggcattgatattgagcagccaaaagcgatcaaggcaacgtaaaaaagatgcacataaaactcttgttttttgctgtattttcggcactttcaaggtctggtaaatccgctgttttgctgggaaaagccactgttttctggtataatggaaacatcagaaacaggaggaaaaagcagtggcagacagttccaaagatatccagctccgtgagctgaaggacatgataaacgatctcaaaaagatgataaaaacacttcaggcaactgtcgatgctgccaataaacgggaagaggctcttacccaggaacgggataacctgaaagaagagatagaccttctccgtaaaaaactgtttggcacctccagtgaaaaaagaaccatcgatattccaggccagttaaactttttcaatgaagcggaactggaacaggatccagaagctgtaaaagcagaggatcttgaggcacttcttccggaaaaaacagcaaaaaaacgaaaagcaagagctacagatgctgaacggtttaagggagttcctgttgagaaaaagtatctggaactttctgaggaagagaaactctgccctgcctgtggtaccccactgaaagaaatcggggaagagtttgtccgccgggagctggtttttgtaccggcaaaactgaaagtatatgaatactacagtaagagctatgagtgcccgcagtgcaggcttcaggatataccggttatcaaaaaaggaaaagatggcagatcccatatgctttatggaatggcttctgccggaacggttgcctgggtaatgtaccagaagttttgtaatggtcttccatactaccgtcaggaaaaggactggaaacagtatggcgtggagatcaccagagctactatggcaaactgggtgatccggaattctgaagcattttttcttcctatgtacgaatacttccacaggaaacttctggaacgtggattcgcgatggcagatgaaacgccacttcaggttctgcatgaaccggaacgccgcgcgcaaaccaagtcatatatgtggctgttccgcagcggtgaagacggaggaccacctattatcctctataaatactcggagacccgggccggggacaatgccgtagattttcttcacggcttcaagggttatctgatgtgtgatggctatagcggatacaataaagtaccggatgccaaacgcacagcctgctgggcacacatcagaagatatctgacagatgccatccctaagggaaaagcactggattatacccagccatctgtacagggaatgctgtacattaaccagctcttccatctggaagatgtgatcagatcaaagtattcttccttcgatgctataaaaaaggctcgccttgaaaaagaaaagccggtagtagaaggctttttgtcgtggcttgatcagcagaaccctacccgtggaagcagaatggataaagctgtcacctacattcagaaccgccgctcctatctgactacctatctcgaagacgggcgctgcagtttttctaataatctcagtgaaaatgcgatccgtccgtttacagtaggccgtaaaaactggctgttctgtgacacaccaaacggagcccaggccagcgctatcgtgtacacaatggtagagatggcaaaagccaatggcgtaaacgtctatcactatcttacttatctgctggaaaaactacctgatgatagaatgagtgatgatgaattagaacttctggctccatggaaggaaaccgtcaaagctgaaatcgaacgtcgtgcaaacggatcaaatcaatcatatgtgaattgtcaaggtgctccgactactgaaaagtagtcggggatttttctatcatacctaaaaattaagcgcttactagttttctatacttcaaaatggttgaaagtgcatattccgcaagaactgcgcatccgttccagaggaacggagcgccattccgcttcaaactgagcaaagctcagcaggttgattaattactattggttattctgcgatccctgccaggaaattcaaggcgatatgccttagatgtcattcgacttaagcaggcatctgcgtaggtggaatccccaaaaagctgataccatccggatactggaatctgtgagataataatagttgccttgcggcagtctctggactcgatgatttcaaataaatcgcggcatttctcgatgtccagatccattaagccgaaatcatctatcaccatgagatcataagcggccatttcattcgaatactcaaagtaagtaccttcctgcctggcatgatctgattcctttaagagtgtgctcgcacgtatgtatttaacagtacggttctgatgcattgctgtgatacataaggcgcaggcgatgtgcgttttcccagcaccggcccctccggtcatcagcaggttattcggctcatcgatccaatcacacttggccagaagttctatgacgtgtgtattcagctgacgttctggatcatagattgaactgtcaagatcagctgcaggatatttcagggtcgctttcttcatgagacgtttaaactttttactctcacgctgatcccactcctgatttacaatagcagcaaagcggacttcaaatggttcgagacctgtgtttggttccagcagctgcttttcaaatgcttcagccataccggacatgcgaagtttatacagccgatccatgagtatgttctgttcctttgtgagtttatcgttataaagatagtcttttaatctgtatgccatagtacgtcacccttacttatagtagtcctttcctctgatattttcatgattgggcagtgttcctggtgaatgctcggggagttccttcacatccatctttttcagcatctgcttgaaggtaaaatacttacaggaattgatctctatacatttacgggcaacttcttcagcagcacctttcgggattgtttttactttatgcaggatacctgcacaggcattataagactgctcttcatgttttgatgatttaaggagtctgtcaatcagttctgacatcgcaggaccaatggcagaagcccagcggcggtaataattaccatcctttgaattgacttctttgtaataaaggtgttctggcggcatatgttcatctaccgtgatatacagcggaaactctctataagaccgcttatgtgtacagatcagccgattatactgatcacagattctgatctctgaagcggttgccttcaggattgcaggcttgccacagtaagagtacaatacggagtagtagtggccgtcatactcgatgtggtagttgttgggaacttttaggaccgctttatagtcgcaagccgtgtaacatccgcctggcagtggtttcatacatggtttgtcatacttttcgaaagcatcctgtcttgagaaatccttgccttgaaaagatcgtttattgaggactgctactatttttttgatttcagcattcaggtcttcaaatgatatatatatcttttctttcagtttctcaaccaggtgtatttcaagataacgtacatgattttcaactgtaggcttgcctttcggctttctagcgggtggtggaagaactatagtttcatagaaatcttccagatctgcaaatgtagactgcaggataagttcatcctttgtgtgcttggttacagcagttcgcaggttatcgggcacaaagtatttcgtaacagcaccataaaatgaaacagcatgggcacagccttctataaaacatgggagcttctcatttggaaaagcttctgcatagatcaggctgctgactccaagcgtggtcgcaaagatatggacttttttgatctcgcccgtttcggtatctgttaacagttccggctgatcaccgacccagtcgatatacatcttttcacccgggattcggtttacggccattgataccttctggccaccatagttttctgctatgaatcggttgaagtattcgtaaaactgtgacttctcataaccatcaggattcttttctttataatccagccaacagaacgaaatgttcatgcggctccctggtgcatggattctgtcatagtaatactggaaatctggaagtgggacatctttcctctgtagatttttctgcggatagaaaaggttctccactttcttaggtgccatcattcggagttcctcgattgggattccgttggcatggtatcggctcatgatcagatttaatgtacctgagccaatcttgtaacggtccataacggacctggtctggcatccattcaaacgcatctggatggagccgataatcgtgttgtagtcttgcatagttatgcctcctttcgcaatcatttgatgactacgaaagaactataacacgttgaaaacttattgatcagctgaagcggaaacgcgttcagttacatccggaaagactgatcagttcttagcggaatgcgtggtcagatgagccggaatttgcagttgaaagtatagtgtttatgcggataatcaaaaattagatataaaatttatacttaattaatatagttttttatgatgagtgtgggcagaaagcgtgagtaaaatcagctttctgcccatcttttatatgataatagttacaaaagtatgagataaacaataggagatatcacagtatcttatatgccataagtgttttgcttgcaaaacggggagctgcttttaggtgtcataaagatatgttgtgccatttcaataaaatgttgttgacctcataaattatcaaaatactgatttacttgcctgtctctgaattgacctgtatactgtcatcagcatacaaaaaggaaaaggtctcagagcaccctcccggcaagttgtgtactctgagaccctggtcactaaaccatggttattatatcagattattcacttgtcctcaaggaggattttggtgttttttgttgagagcagtgtgaccacccatatgtgccccatctgtcaggctacgcttcgttaccgggattcacgcccacgcatccgtagaaaggaaggcggtttaaaagatcagttgatcatccggcggttttattgtaagaactgccactcttatcataatgaacttccggattgtcttgttccgtacaagcattacgaaacagaagtgatctccggggtgctggatggcgttgtacagccggaagacttagattctgaagactacccgtcctgcgctaccatgctccgctggctgcaatggttctgcgaaaatcttgaacgtatcaacggatatttaaggacgatccgggagttcctgctgggttataatgaagagaggatttcccctggttcactgctcgattttttcaggaatcaatatcaaaactggttggaaatcatcttacgccagatttacaacagcggaggatttttagtcccgatccgctggtaaggcttatgcacctactttgcatcgtctgtcaaagtaccaaagggtatattggtctcaaaaggaggtcattatcttatgaatacaacaataaacagacaacaatggcaagaggaagaagccctcaggcgttttcaattgatttcaccgcttctccagactggtctggatgatgcaaagcgtatccagcttcgcaaaaagattgcagaggaaaacaacatatctgtccgttccctttaccgctatgaaaaagctttttcggaaaggcagtttacagggctaaaacctgctgaccgtgagaaacaccggtcacaaaaacttccggaaaacttttcgttcctgttggaacaggcaatccaacttcgcaaggaggttccggagcggtcggttgcccagatcatctacattctggaaacggaagggcttgcggtacccggtactttaaagcgttctactttggaacgccatatctataaggctggttacggacaaaagcagatgcaaatgtatcaggatgcaagaaacagttcttccaaacgcttttgcaaaccgcaccgtatgatgctgatccaggcggacatcaagtatggacccaagcttccaatcggaagaaatggggctaaggtacagacttacctgtcctcagcaatcgatgaccattccaggtatctcctatcatcccggttttatgacaatcagggagaatcaatcattgaagatacgtttcaccaagcgatttcccggtatggaatcttcgattcctgttactttgataatggaacacagtatatcgcaaaacagatccgttcttcccttgcaaggctgggcatccgtgtgatgtatgcaaaaccaagatccggcaaaagtaaagggaaaatcgaaaagttccatcaggtggtagatgcttttatccgggaagcaaagctgaaaaatatcaaaacactggaggaactgaaccgtttgtgggcaatctgcctggatgagtattaccacaagaaaaagcatgatggcattgcagaatactatgaaagcctcggtgctgccattccggaagaagggatatcaccactgcaggaatggaaccgggacagccgtccactgacttttttggatacagccgttgtagccgaagctttcctgcaccatgagcagcgaaaagtggataaaggtgcctgtatcagtttccgtgggcaaaggtatgaaaccaaacctgccctgatcggatatacggtggaaatctcctatgatccggcaaatcctgagatcatcaccgtttcctatcccggatttgaaccttttcaggcaagtcctgtaaagattggaccgtattgcgacaggcagacagcacttccggctgccatgcagggacaagtgccgacaacttcccgttttctggatgcgctggaaacgaaatatacacagagtaagtaccagatggcagatgcgatttcatttgcatcttacaggaaggaggcgaatgactaatgtatgaatcattctttggcatggaacatacaccgtttgtccgggatgtccctcctgaaaaactgttcgaatccaatgctttccgggaaactctcggccgtctggcttatgtggcggaccgccagatgtttgctgttgtaacagctgattcagggtgtggaaagtcaacgcttatccgccggttttattcggaacttccaaaagaggattacatcatcctttatctgtcagactcaaaactgaccccaaggtggttctataaaggtctgctggatcagttggggctggaatcccgtttctaccgcggtgattcaaagcgccaactgcaacaggagatcgaggtaatccggggcgtacagcgtaaaaaggttgtctgcatcctggatgaagcccacctgttagagaaggagacgctggaagaattccgctttttgctcaattaccggtttgattccatgagtcccatggctcttgttttagttgggcagacagaactgtgggaaaataaactaaagctacagcggtatgccgccatccggcagcgcattgacatgtactgtacgctgcctcatcttgaccgttctgaaacagaacaatatatcgcaagccacatggattactccggatgcgggcaggaaatatttacaaccaaggcattggatgagatccataaggcatctgcaggaatcccacggatgatcaaccgtgtctgtgaaaaagctctgatgtatgcgtttcaaaatcagaaacgattgatcgatgattatatgatcaagttcgttgtggaacacgagatgcttgggatggtaacttcataaagcaggtaccgcctggaaacaggcggtattgcctaactgactggtgacagaaagttaagcaagtgagcgtcaactgatgtgagcaatctggtgacagctcatgaaatcactaacaataaaaagtaaagcatgagagcgggaagcagaataagttctactcatgtgtttcttcgtttgcattgacaatgaagagaaaatcccttagtttcaatgagaaacctaggggatatcgaatgtatcccatgaagaaatatgctacactaccgaaaaaggcatggaggacagtagaatggattataaagagcaagtaaaaaagtatcttgaatatagtgagtataggaaagaattggattggaatacgctgaaggcatacagaattgattttagacagttttttgagtttacacaggaagatatcccagaaaaaagcaaaatagaagattatatagtggaattgcataaaaactacaagcagaaaaccataaaacgtaaaattgcatcaatcaaagcatattataattatttggaagagtgcgaaattatcgatgatagtccgtttagaaaaattaaagtaaaattcaaggaagcagcaattttacctaaaataatcccgcgtgaagaaattgaaactttgttgaattatatgcattcatgtaagaagagaagtaaggataatacttataagtactggttacgggatatagctgtaatagaaacattacaccacatatattccgacatacatacgcaactgttttaaaggaaaatgatattagtttgaaagcgatatctgtctgtatgggacataatggaacaggggttacaaaggatgtttatatcaatcttcctgaagaaatatatgactgtgagaaggtgattggcaattttataatagatattctgcctcaaacagattttgtattcgacattcagatatctgagaaagatttgcttgaactccttccgcaaaaagtatataatatggtgggttaacatgctgtttcagaatgttttctgctgcttcatatcaaacaatatcatattctcatatagggtgttaaatgataggaaaagcaggacaaaatttttaagaatttaattataaaataggtgatttatagtatcaaattatgttatgcagtgctatgtattttatgcaagaccatgaaaatggtgtataattatgcatagtgctgcacagtagaaaaaaagtaaatttgttacgcaagggcaaaaatcaggtgaaaaacagcatttttcatactgaaaagcgtccctgaaaatcataaaaaaacagctatttttcgtgaaaatcgaaaaagaaaagaagattacttttttgtatatattaaacaaaaacgaaaggagaaatatgagaaaactagctttaaatgatgaaatattactaaaaatcgagaagccggcccggtatatcgggaacgaagtgaactcggtgatgaaagacaagaatgaggtggatatccgtttcgctatgtgctttccggacgtttatgagatcggcatgtccaatcttggaatggctatcctttatgatatgtttaataaaagagaggacgtatggtgtgagcgtctgttttccccgtggacggatctggataagatcatgcgggagaagaagatacctctttttgctctggaatcccaggaaccggtgcgtgactttgattttctgggcattactctgggctatgaaatgtgttacaccaatgttctgcagcttctggatctttctcagattccgtttctggccaaagaacgcggggaggaattccctcttgtgatcggaggaggcgcctgcgcctataatccggagccgctggcagagttctttgatcttttctatatcggagagggagaaactgcctatgatgcgctttttgatgcttatattgcaaacaaaaaggcagggggaacaaaaaaagattttcttttaaaagcagcgcagattccgggaatttatgtgcctgctttctatgatgtaacctatcaggaggacggcaccattgcgtcctttacgccaaatcagccggaagctccttctaaggtagaaaagcagctggttatggatatggacagggactataattttctggaagcgcctgtggttccttttattaaagcaacccaggatcgtgtgactctggagattcagagaggatgcatccggggctgccgtttctgccaggccgggatgatataccgtcctacaagggaaagggatattgaggatctgaaggaagctgcccggatcatgttaaaaaataccgggcatgaggaaatttccttaagctccttaagctccagtgactacagtgaactgaaggaacttgtaaacttcctgatcgatgagttccgggataaggcagtaaatatttcccttccgtctctgcgtattgacgcatttgcgctggacgttatgagcaaggtacaggacgtaaagaaaagcagccttacctttgcgccggaggccggttcccagcgtctccgcaatgtgatcaacaagggacttacagaggaagatatccttcacggggccggacaggcctttgaaggcggatggaaccgcgtaaagctctactttatgctgggacttcccacagaaaccgaagaggatatgaaggggatcgcccaccttgcggaaaaaatcgcagaacgttactacgagattccaaaggataagcgaaacggtaaagtgcagatcaatgtgagcacctccttctttgtgccaaagccttttacaccgttccagtgggcgcctatgttcagggaagaggaatttattgaaaaagccaaaatcgtaaaaaatgaaatccgttctcagttaaatcagcgcagcatcaggtacagctggcatgaaccggatgttacggttctggaaggtttcctggcaagaggcgacagaagaagctccaaagtaatcctgaaagcttatgaaaaaggagctctctacgatgcctggtctgaaagcttccgatatgacatctggaaggaagcttttgcagaaaccggcgttgacatggagttttatactcttcgtgagcgggatacagatgagatccttccctgggattttattgacgcaggcgtaagcaaagaatttctgatccgcgaatggaaacaggcaaaggcggagacagtgacccctaactgccgtcagagatgttccggatgcggggcgaaaagatatggaggaggtgtgtgccatgaaggtcagaattaaatttacaaaaacaggagcaatgaagtttgtgggccatctggataccatgcgctacttccagaaagccatccgcagagcagagcttccggtggcattttccggaggctacagtcctcatatgatcatgtcatttgcagctcctcttggtgtgggaaccacaagtatgggagaatactttgatatggagcttacggaaaaagttcctacagcagaaattgaagatcgtctcaatgcagttatggtggagggcattacaatcagctctgcaagacaggtagaggacggcaaggcaagtactgctatggctcttgtggctgccgcagattattttgttgctttccggccgggaaaagaaccctgcgggaactggcaggagaagctggcggattttcttgcacagaaggagatcacagtaaccaaaaagacaaagcgcagcgaaaaaactgtggacatccgtccgtttatttatcagatggaggcctgtgacagcggcgtattcatgcagctggcttctgcaagctccaattacaccaagccggagcttgtaatggatacctttgtgcgctggctggataaagaaccgcaggagtttgcctatatgattgaacggagagaggtttacgcggatgcaggcgaggataaaaatccccgtttccttccgctggaagccctgggagaaaaagttgagtaagctgatcatcacagaactgaagctttggggctgctcctccattgtgtgcgctgtcgcagaaaatcagaagatcatggagctgaggcttgaagcagcagggaaaaaaagtattctgaataacatttatgtgggacagattgaaaagatcgcccagaatatccaggcggcttttgtgcgctttggggacggacttaccggatatctgccccttgttccgccggaacaggtgatttttactgccggaaggaaaggaaatgccccgttaagggcaggagacgagcttctggttcaggtaagcagggacgctatgaagggaaagcttcctgctcttaccacaaacctgaactttccgggaaaatacctggtgcttacaacaggaaaccgcaagatcggattttccggaaagcttacaaaggaagaaagcagtcttctgaataaatggctggaaccggaaagagagcgcggtgacagaggctacgggctgattgcccgcaccaatgcagcagaggcctccaaggaggaatttcttcatgagcttagctgtctgaaaaagatttacgagaaggctgccattaacggacagaaccgtatctgcttcagccttctctatgaggcggagcctttttatgtggcagcagtccgggatatatacagccgcaatctggaagaaattattacggacattcctggaatctatgagaagcttaaggaatatctgaaggactttattccggaggaggctgataagctgagtttttatgaagataagcttttgcctcttcataagctctaccggctggaacatactcttgatgaggtgcagcaggaaaaaatatggctgaaaagcggcggttttcttgtgatccagcagacagaggcctttgtttccattgatgtaaacagcggcaaatacacaggaaagaaaaaggcagaggaaacctatcggaagatcaatcttgaagcgtctgaggaaattgcccgtcagatacggcttcgcaatctttccggaattatcctgattgattttatcaatatgcagaatccggatcatcaggacgagttgttccatgtgcttcagaaatatcttcggaaagatcctgtaaaggccagagcagtggatattacgcctctgcatattctggaaatgacccgaaaaaaggtaagaaagcctgtgcgggaagaaattttagagatacggaagcagagcgaagaaaaataaattttctgtaaaaacaggagataacgcagattaaggcctacaggggatagaaacggaggcagaggagggatttttatgtatctggggtatgctttaagaaaaatggcacgggaacttggactggaagtaaaagatggtgttgtctgtggcatttttaagagatatgcggtcagcatgtgggagggactgagtggcaccaaaaccttcagtatttcagcaaaatttgatgataagctatacgaaaagctggataaagatttcagtgagctggaatataagtatcagagattactttatatcagatttatggatgatactctgacagctgaattttctgataatccgggaaccatgaagcagtttcgaaattgcttttttgatgttctttctattttagaccagtatgatatcccggatgcagatatctgtcctaaatgcggacttcccatgtatggacagggcgtatggtccatgtgtgagatcataggaagtaaaatctgcctgtatgctcatgaacattgtgcggcagctatggaacgggaagtaaacagacagctggaaatagggaaacgaacccctgtctcaaaggagcagtttattaaggacatcaaagaggcttatccggaagaatccattaaagaaattgaaaaagcgtacaaagaaatagaagcagagcaaaacccgggaaaaagatatcttcccggatggatcggcgctctgggcgggtgcatccttagcgctattctttttgttgtactgtgtttgatggacagcggttcccactatagcagaggcggaggactgagcctggtagcctgctgtggcggatttattataaaaaaaggatatgatctgacaaaggatacttatgggaaaaagcgttgctttacaattattattatgactgtgctttatgtttttctgggagttttgggaattgctgttgttcaggaagcaatggcaatgaaccagttcaatacagttccggagggaatatctattgtggaagaatgccggctatatatacattccggaatacgatcagtgttattggataaaggacgctttctgatcgggctgattatctttacatctgtttccctgtttattattattgtggatttgtataatgacggagacagagatgagcgcatgcgccgcaaacgccttcagaaaaggaaataagtttactgcctaaaaaattaaaaaaatttcattacatatcttgacgaatgaaaataaccgtgctatcatacaaaggatgccgcacaaagaggttgaagcggcgggattttgtgcctgcccaccatatttggcgagtaaattttacaggaggtgccacagatgtacgcaattattgcaacaggtggtaaacagtacaaagttgccgagggcgacgtaatcagagttgaaaaactcggtgttgaagctggtgaaaccgtaactttcgataacgtgatcgcagtcagcaatgacggattaaaggttggagaagacgtaaaagatgccagtgttaccgcttctgtagttgagaacggaaaggctaaaaaagtcatcgtttacaagtacaagagaaaaactggatatcacaagaaaaacggtcacagacagcagttcactaaagtgaaaatcgaaaagatcaacgcttaatctggtgtttgtatgattacagtgacagtcacgaagaagaacaattcctatacagagtttacttcaaaggggcatgccggttatgccgaggaagggcaggacattatctgtgctgcagtttccgttctggtgatcaataccgtaaattctcttgagactctgacccacgatcagatttccgtaaaggaaaaggacggttatgtttcttttacttttacagagtctgtatcagaaggaggaacccttcttatggattcccttgttctcggactgacagaaattgagcatagctattcaaaacgatatttaaaagtaaaagtcagggaggtgtaacgacatgatgaaaatgaaccttcagttattcgcacataaaaaaggtgtcggttctacaaagaacggccgtgattctgagtccaagagacttggtgccaaaagagcagacggacagtttgtaaaagctggtaacatcctttacagacagcgtggaactaagattcacccaggcgtgaacgtaggctgcggtaaagactatacattatttgcactgacagatggtgttgtaagattcaccagaaaaggacgcgataagaaacaggtttctatcgttccggtagaggcagaataatcagtttggcgtaagggcttcaaatcgttcatggtttgaagccttttgtttacagtataaggagcgactttatgtttgcagacagagcaaaaatcattatccgttctggtaagggcggagacggccatgtaagcttccgcagagagctgtacgtacccaacggcggtccggatggcggggacggcggaagaggcggagacgttatctttgaagtggacgagggacagaacactctgggagattacaggcataaaagaaaatttaaagcagaggacggagaagaaggcggcaaaagacgctgccacggcggagacggcagggatattgttcttaaggttccggaaggaacggttattatggaagcagaatcccgcaaggtcattgccgacatgtccggcgataataaaagacaggttgtgttaaaaggcggaagaggcggaaaaggcaatcagcattatgcaactgccaccatgcaggtgccgaaatatgcccagccgggacagcctgctcaggagcttgaggttcttctggaactgaaggtgatcgcagatgtggggctggtgggcttcccaaatgttggaaaatctaccttcctttccagagttaccaatgcccagccaaagattgccaattatcattttacaacattaagccctaacctgggcgttgtggatacagagaacggcggatttgtaattgcagatattcccggactgatcgagggtgcgtctgagggcgtaggccttggtcatgaattcctccgccacattgagagaaccagagttctggttcacattgtagatgcggcttctacagaaggccgtgatccggtggatgatatttataagatcaacaaggagctggaagcttataatccggaaatcgcagcaagacctcagctgatcgctgccaacaagatcgactgtatctttgaggacggtgaggaaaatccggtggatcgcctgagagctgaatttgagccaaagggaattaaggtatatcctgtttctgcggcaacaggtcagggaatccgtgaactacttttcggtatccggcagcttcttgatgagagccctgcggagcgtattgtatttgaacaggaattcttcccggaggatgttcttattacagaaaatcttccttatactgtcacaaaggcggaggatgatcctcatgtctttgttgtggaaggaccgaaaattgaaaaaatgctgggttataccaatctggattctgaaaaaggctttgccttcttccagcgtttccttaaggatggaggtatccttgatgaactggaaaatgccggcatagaagaaggcgataccgtgcgcatgtacggatttgactttgattattataaataagtgatattttagaaaggctggttacagttatgacaagtaaacagagagcttatctgaaaagcctggcaatgaaaatggatccggtccttcagcttggcaagggaagtgtcacaccggagaatacagcttctgtggatgaggcgctggcagccagggagctgatcaagatcagtgttcttcagaactgtctggatgatccccgccagatggcggaggttcttgcagaaagaacacattcccaggttgttcaggtgatcggacgtaagatcgtactttaccgggaaggaaaaaaagacaagaaaaaaatcattctgccataatacaggaggaatgaatatggcttcacatcgaaaaaaaataggaatcatgggaggaacctttgatcctgttcacgtaggccatctgattctcggagaaaaagcatatgagcagctgggtcttgaccgtgtatggttcatgccaagcggaaaccctccgcacaaaagaaaccgtcagggcagagcaagcaatgaagagaggatttccatggtgcagaaagccattgagggaaatcctcattttgaactttcgctgatagaaatgaacgaagacgggtatacttatacctatcgtactctggagcggctgaaacaggaaaatccggacacagattattattttattatcggagcagactcactttatgattttgccacctggaaggagcctgcccggatctgccgggcctgtaccattgtggtcgctgccagaaatcatgttcccactctcagtctggatcaggagatgacatatctttctcatcagtacgggggatgctttatccggctggatacgctgaatattgatatttccagtcagctgatccggcagtggatccaggaaggaaaaagtcttcgctattatgttccggatccggtggtttcttatatccgtgaacatcatatttatcttgcgccaaaaggagaacctgaatacaatggctgaatacgattttataaaaatacagaaaaaactttcaaaatatctggatgagaacagatttcatcatacccttggcgttatgtatacctgtgcagctctggcaatggctcatgactgccccatagcggatgcgcagctggcaggacttcttcatgactgcgccaaatgtattcccaacaaaaagaaactgaaaatgtgcggggaaaacaagattccggtaacagaatttgaaaaggaacatccctttcttctccatgcaaagctgggcgcttttgtggcaaaggataaatatgggatcagaaaaaaagaaattctttctgctattgctttccatacaacaggaaagccggatatgagccttctggaaaagattgtttatattgcagattatattgagccgggcagggacagggcgcaaaatcttcctgagatccgaaaaattgcctttcaggatctggatgagtgcatgtatgtgatcctgaaagataccctggattatctggaggagactccgggagaaattgattctgcaacagaagatgcgtttgcttactacaaagatttacatacaaaaaggcagggaagctgattctcctgccggaaaggggctttgatctatgaacagagaaaaggaaatgacaaagattgctttaagagctcttgatgacaaaaaagccatggatgtaaaagtaattgatattcatgaggtttctgtactggcagattattttgtaattgccagcggaagcaaccagaatcaggttcaggctatggttgacaatgtagaagagatgcttacaaaagcaggatatgagccaaaacagattgaaggtaccagaaattcaagctggatccttatggattacggcgatctgatcattcatgtatttgatgaggagaaccgtctcttctatgacctggaaagaatctggcgtgatggaaaggttctggaaatggaagaatttctggctgaataagacagtctgcataagactgcttatcaagctcaggtttacagtaaaattattatgtaaacttaaaaaagaaattctcagcaggaagagatttttgagaatcctgcggtttgtaaaaataatttctgataagaaagacggatccccggatgctgtggatgaaaaccagcagcttccggggatccttttctgtctgatctgattaattataaaaacgaaatacgccaaatactttgccaaggatctgaagatttccatgaacgagaattggatccatctcatcattttccggctgaagacgatagtagccgtcttctttataaaaggttttgactgtggctgcatcctccacaagagccactaccatatctccgttttcagcagaggactgctgttttaccagaacctggtcgccgtcaaaaatccctgcattgatcatactgtctccctttactttcagaagaaagctctgggcatttggcataaactctgccggcacagggaagtatccctcaatgttttccactgcaaaaataggctgccctgcggctacggttccgattaaaggaacatttacaacctctctgcgcacaagattaaactgatcgtcaaggatctcgatcgctcttggcttcgttgcgtctctgcggatataaccgttcttttccagggcttccagatgagaatgaacagaggatgtagatttcagatggactgcctcgcagatctcacgtactgccggaggaaatcctctgttcagaatctcatttttaatataatccagtatttcctgctgttttttactgattctgccgtatgccatatttttacctccaaaatttccgcttcattccgttttcgctattataccatacttttttctggatagcaaacaaatattcggaaaatatgttcgtaaactgcagaaaatttatattccggtttatggaccacagagaaaaaactgtctctttttcttgtcagacagggtctaaaatgttacaatgggttcgtatatctgaaaaaagttatttaaaggaggcatttttttgcctgatcacaataaatcaccaagaagcccggggcttctttcaaaaataaaaaatattttcggcctgaatatcggaaccattatttttggggtgctgctgctttatatgatattcagtatgatcgtatatctgacatctgataccgtagaatcctatcaggtcatttccgggcctctttcccgaaatgaaacatacacagggctcgccatacgtgaagagtccatttataaagcagattctgacggatttatcacctattatgcgagagagggcaataagatcaatgccaatggacctgtttacgggatcagcagctctaaggcaacagaaaacagcgccgagctgactcctgaagaactgaccagcatccgcaatgatatgatgagtttttccaagggctttaatccaagcaaatttaataatacgtacagctttaaatatactctggagggaaatatccttcagtatgcaggaacctccgaaggaggcgcggtatctctgggaggtcaggcggttacaaaagcagacagcgacggaattgttctctattccatggacggctatgaaaataaaagcgtatccactttatccgcagtggattttgatcagaatgcttaccacgaaactgatctgaaaacaggcggttccataaaagcgggagatcctgtttatactcttatcactgatgaacgctggagtctgctgatccctctcagtgaaaaacaggaggcaaagcttgctgacagaacggctgtccgggtgaaatttttgaaagacgataaaactcagaacggagatttttctattatagagatcgacggccagaaatatggtcagattgattttaacaaaggactgatccgctatgcttctgaccgttttgtagagattgagcttgtgaccaacactgttaccgggctgaagattcctctgtcttccattgtgaccaaggaattttataccattccgtccaaatatgccacaacggataaagaaactcagcagactggatttatggtggagggtacggacaaaaacggaaataacacttctgcctttgttgcggctgatatttatgcacagatcgaggacgagagtactgaaacagaagaaggaaaggaaccggactacatttattatgtagataaaaagaaattcaaagaaggcgatgtggttgtctgccaggaggatcagagccggtatgtaatcaaagacgtaggagttctggaaggcgtttactgtaccaatcagggatatgctgttttccgcaggatagaggttcttgaccagaatgaagaatacgctattgtatcccaaaatacttcttatggactttcacggtacgatcacattgtacgtaatgcagacaaagtaaatgaagaagagattttatattagtctggaggcaggaatttatgataacagaaaatctggaacaggtaagaaaaaacattgacgaggcatgcagaatggcagggcgtgacccgaaagaggttactttgatcgctgtaagcaaaacaaagccggtatccatgctgaaggaagcctatgatgcaggcgccagatgctttggtgaaaataaggtacaggagatcatggacaagcatccacagcttcctgaggatattcagtggcacatgatcggtcacctgcagagaaataaggtcaaatacattgttgataaggtttccatgatccattctgtggattctctgcgccttgcgcagactattgagcaggaggcagcaaagcataatgtctgcgttcctgttcttctggaagtgaatgttgctcaggaagaaagtaaattcggactgaaaatggacgaggttcttccccttattgatactattgcagattttcctcatataaaggtacaggggcttatgaccattgctccttatgtggaaaatgcagaggataaccgtgattttttccgacaattaaaaaaattaagtgttgacattgaggcaaaaaacattaataatgttagtatgagcgttttgagtatggggatgaccggagattatcaggtggctgtccaggagggcgcaacaatggttcgtgtgggcacggggattttcggagaaagaaattacgtgcgatagcgaaacaaagaataagattggagattaaaatgagcgttttagataagcttttagatgcagtgaaactgaatgacgattacgatgaggacgattttctggatgatgatatcctggatgaatccgatgatgattttctggatgatgacgaggaagaaaagccggtaaagaaatttttccagaaattcggaaagaaaaaagaggatgattacgacgagtatgatgaactggacgatgaagaggaggaagaacctgttcagaaattcagtccgaaatctgcttcttctgtttccagagttactcctgtaaaacaggaaaagccgatccgtacttcatccagtaagatcactcctatgagaagcagccgcagaagttctcagtctgtgaatatggaagtctgtgtgatcaagccgacatccatggaggatacccgtgagattgcagatacactggttgacaattctactgtcattctgaatcttgaggggattgatgtggagctggcgcagcggatcattgattttacttcaggcgcatgttattctctgggcggaagtcttcagaaagtatccagctatatctttgtactgggaccatccaatgttgacattaccggtgatctccagaatattctgggaggatctgttccgtcagtaagagcaggatattaatatacgatggaaaaagacgattttttcattaagagaatccgggaactggcaaatctctcttatcagagagatattgtcaccttttcggattttcttaatttaaacgaacaaaatctggtaacaggccaggcagcgcgttttccggggattgttatggagagccagggcggatatgacggggcggagcgtcagatgatagctttttatcccacagatctgggattctactgggaatatccgatctgctgtctgaaaattgaaccgaaggcagcgaaattttcggaggcgcttacacatagagattatcttggaaccattcttggtctgggagtggaacgctctgtgatcggagatattcttgtaaaagaacatggggcctgggtgttctgccataacaagatcgcggattttattatgaaaaatctctgcagggtccgtcatacaactgtaactgtatcaaaggtagaaaacccggaggagcttcccggtcccggctttgctgcagtttccggaacctgtacgtctgtgcgtctggatgctcttattgccattgcctttcaggcatccagaagcagcatggtttcttatatcgagggcggtcaggtttttgtaaacggaaagctgatcacttccaatggatatgaaccaaaagaaggagatattatttctgtcaggggaaaaggccggtttatttttgaaaaaatttccggaaaaaccaaaaaaggccggacaggggtcagtcttttgaagtatgtataaaagaacaggaggtgttcgagcatggaacacaatatcttaaacgttcgccgtgagggagaattttattatcctatttattttgaagaagactttgcagagctgtgcagcggactgaaaaaagaaaacctggtgggcagaagggtttgtattgtatcagattccaatgtattccccctatatggagataaggtaaaaaaaatactggagtctgtggaagaatctgtggatgtttttgtctttgaggcaggagaaccaaataaaaatcttgataccgtccagaacctgtaccgcacactgatcgaaaataaaattgaccgtaccggctttctgattgccctgggaggcggagtaaccggagatcttaccggttttgccgctgccacctatcttcgcggcattgatttcatacagatccccacgacgctgctggcgcaggtagacagcagcgtaggcggaaaaacaggggtggacttccagcagtacaaaaatatggtaggagcttttcatcagccccggcttgtatatatgaatatgaatactctgaacacccttcctgaaacagagtttatctgtggaatgggagaggttctgaaaacaggtctgatctgcgacagtgaactgtttcgttctgtatgcaggcagaaaaagcagatccgggggcttgacagtcaggttcttgcttctgtgatccgcagatgctgtgagatcaaggccggtgttgtagagcgggatccgaaagagcagggagaaagagcgcttctgaatcttggacataccataggacacgccgtagaaaagcttatggattttcagcttcttcacggacagtgtgtggcagtgggaaccatagccgcagctgcaatatcccggaacagaggactactgtcagaaaaggaataccaggagattctttgcggatgcagggatttcgggcttccggtttccgtacaggggctggatccggaaaagatcctggaagcaaccagaaatgacaaaaaaatggaacagggtcatattaaatttatccttatgaaaggaatcggcaacagctttatagataaaactctttcagaccaggagattcttaagggtattcaggagattttacaatgactcaaaaacaggagcgaaatacaagtacctttccaggagccctctgcggcttctggtggtgcctttctattattctgcttacagttcttgaccagtggacaaaacacctggcagaaatccatttaaagggaaatcagggcatttcactgattcccggagttctggaactgtcttatctggaaaaccggggcatggcttttgggatgtttcagggcagacaggtactttttcttattctgtgtatggcctttttcgcagtgcttttgtatctgtatgcgcgtataccgaaaaataaatattacctgcctcttctgataacaggagctgctctggcctccggcgcgctgggaaattttattgaccgtctgctttacggatatgtcattgactttatttatgtttccctgattgactttccggtctttaatgtggcagatatttttgttgtgtgcggaggaatcgctttcgttattctggtgggattctgctacaaagatgaggattttgattttataaaacgaaaaagggataattcatgaagactttaaattttacaaccgggcaggaggaaacttctgtccgtattgaccgttatctggcagaaaaatgcccggaattttcacgttcctatcttcagaagcttctgaaggaacaggctgtttttgttaatggaaagccggtaaaagccaattacaaaatccagccggaaacagaaatatgcctggaaattcctgatatggagcctctggatattaaaccggaagcaattccgcttgatattctgtacgaggatgattaccttcttgtagtaaataagccaaagggcatggtagttcatcccgctgcaggccacacagagggaactctggtaaatgcagtgatggctcattgcggagaccggctttccggcatcaacggggttctgcgtcccggaattgttcacaggatcgacaaagacacgacaggggctcttctgatctgtaaagaggattctgtgcacagagatcttgcagagcagctgaaagagcattctattaaaagacgttatcgggccattgtggccggaaatctgaaagatgatgagggaactgtggagggccctatcggacgtcatcctactgaccgcaaaaaaatggccatcaacagcaaaaacggaaaacctgctgtaacacactataaggttctggagcggttcggacagtatacctacattgaatgcaggctggaaacaggaagaacgcaccagatccgtgtacatatgacaagcatcgggcatccgcttcttggagatacggtatacggttcatccaaaaatccttttcaccttcaggggcagacacttcacgctatggttctcggctttgttcatccggtaaccggtgaatatatggaatttaccgcacctttgccagactattttctgaagttattagaaaaattaagaaaatagttggcatttccctagaaatcatgtataatatatgtcagaaacatgttcgcagaagggagtgtatcgcttatgagtaatacaacaagttcaattattacaatcggaagagaatacggcagcggaggaagacagatcggccaggaggttgcaaaatattttggcattaaatgctatgataaagaacttctggagcgcgcggcaaatgacagcggaatctgtaaggagctgtttgaacaccatgatgaaaagccaaccaacagttttctgtactcacttgttatggatacctattcctttggatattcttctgcgggattcaatgatatgccaatgaatcataagatttttctggcacagtttgatgccatcaaaaaactggcagaagaggggccctgcgttatggtaggccgctgtgcggattatgcgctttcagactggccagactgcttcagcattttcattcatgcagacatggatgccaggattcgcagaattgcttcaaaatacggaaaatcagacaaagaggcaaaggatattattataaaaaccgacaagagcagagccagctattataattattacacaaataaaaaatggggttctgcaaaggattataatctctgtattgacagcggcaagctgggacttgacaatgcggcaaagattattatcaatgccgttcaggtttttgatgaatccaagaaaaaataaaatagcaaataaaaggttttcagcaccggggatcaaatatatttccccggtgtttttatgtaaatgactgtgaatgaagtggacagcaacacctatgtatttatacacaaaaataacacttaaaatttatgacacatttatgtaaaaatatgatatactgatttccagaaaacagaaagaaaggaacagttatgagactttttattcagagagttctacaggcggaagtgacggtagaaggaaataccgtgggtaagatcggaaaaggacttctggtgtttgtaggcgccggaaaagaagataaccgggaaattgcagataaatacctgaaaaagcttctgggactgcgtatttttgaagatgaggcaggaaaaacaaatctttccctgaaggacgtgggaggagagcttctgctggtttcccagtttactttgtatgcaaactgcaaaaagggaaatcgtcccagctttattgaagccggagctccggatatggcagaagaactttatgagtatatgatccaggaggcgcagaaaacagtccctgttgtggaacacggcgtttttggagcagatatgaaggtagctcttgttaatgacggaccctttaccattcttctggacgagcatatattataaagaaagtgatctgtattgagaacggcatacataaggacccgttgaattatgtggctcagcctgcagactaaactttataaaagtaattatttgtaaaaattatttataaaagcagtatttattacagcatgctgaaaatcagagaacagccctcgaaaacaggaaaaagggggctgttgttgcaatctatatctatacgacaaacccgagtttttcatatagatgttgccggaaagccacttctgtggtataattatactgaaaaccataatttcagtaaatgtgctgttgtgttttattccaccgtatattttgtattttccagtgcagatacatttgatgtcctgtgattgcattgaactttttaccttttgtgtcatctgttattgttatttttattaaataaaggagttttattttttatggaaccgaaacaaacctaccatgaacatactgatattgaaaatactttgcggcttcgtcaggttcttgcgactttgccgcctttctgcagggattatttccgtgccattgacgcaacaaccactacaaaaacaaggatttcctatgcctatgatatccgcattttttttcagttccttctggataccaaccctgcttttaaggataaagccatgactgatttttctgtaaatgtactggatcaggtaaaggctcttgacattgaggaatatcaggaatatctgaaggtttaccataaccataacggcgataaaatggaaaccaacagtgaacgcggcctgaaacggaaaatttctgctctgagaagcttttacgcctattattataaaagggaaatgattgagacaaatcctgccgtgcttgtagatgtacccaaaatccatgaaaaaagcattatccgtcttgatgcagacgaggtggctctgcttctggatcatattgaacatgcaggggatacgctgaccggacagaaacgcgcttactgggaaaaaacaaaggaacgggatcttgccattgtaacgttgcttctaggaaccgggatccgtgtttcggaatgtgtgggacttgatattgaagatgttgattttaaaaataacgggattaaggttacgcgaaaaggcggaaatgaaatggttgtttactttggatctgaggtagaaaaagcactgaaaaattatctggaagtcagggaaaatattgttcctctctccggtcatgaacacgccctcttctactcttcccagaaaaaacgaatcggtgtgcaggccattgaaaaccttgtaaaaaaatattcccgtgaaattacgaccacaaaaaagatcacccctcataagctgcgcagcacctacggtacggctctttatcaggaaaccggcgatatttaccttgtagcggacgttctgggccacagggatgtaaataccaccaaaaagcattatgcggccttagacgacgccagacggcgtcaggcagccacagcggtaaaattgcgggaggactgatatcctcccgtttcttatccttctctggtaccaaggatctgcacagaaattgctccatttgcataagaagcctgtattttaaccggatattctgtgttgtttttgaatttgtagtccatagttccccaggacacggtagcatccataccactgggaatataggcaacaggctttgaatggggatatcgctccacaatctcaagacctgcattgagacaggctgcataaagggtggaggaaacctgacagattccccctccgattcccggaaccagctgtccgttggctatgacaggagcagactgaaatcctctttctatggttctttctcctactgtatcattgtaggaaaatgtatctccgggattcagaatcacatcattacagcttccgcatgccagctgaatatttgcgatccggccgctgcttcctcctccgtaagtggtataacttccaagcacatcccgataaagcatggaggtcagctgttctgttgaaagctccggttcagtgatggcaaaagaaattcttacatcagcgccctcatctgcctgtttcagctgtttttctgcttcttttacgtcaaaggatactccctgtacagacggaactactgcataattattttctctgtccagaaaagcgttgctcatttttacatataccttgtcatgcagaggctgaagctccagctcagcaggcgttacctttatttccgggcatttcagctttgtctcatattcatgagcattaagatactgcaggagcatttcctttaattctttcagatctgcctttattccggtacgtcctttatgaatagtaagagaagttttatcctgatcccaggtagtttcttttaccgtatttactttttcaatacctgttttccggattgcttcatccagcttttccggttcagaagctttcggaaggatttccagagaaacgggttcctgatcttttaatttaatcttgtccatacctctgacataccattttccgtgtccgggtctgtaggcttctctgatttctctggaagcattcagagaaagaaccggaaaaatttttacttcatagtttttttctgcaagggatacggtgatctcagaatcctgataatcttttttgaattgctcctgtactgctttttctgcagcttctattgtttttccctgtaatgcaaccccgtttatggaaacatccttccagatcactttatcatccagcgtggtacaccagtataaatatcctgcggtcagaataccggcagtacctagtattgcagccgctgttattttccatttatttttctttttcatcatttgtatatctgtccttttgttttttaaaaaacaggagttctgcccaacggcaaaactcctgtaaaaccttccccattatatgtagttttataaaaattaaatattataaagctgttgcaatcttatcctgaaattcagccggaatttcttctttatcaagagatacgctgatgataaaggaaataccaaatttttctccgatttcctcaagttgttcaagagtaccggaaatatcaagaccttccagtttagctgtggttaaaaagctgtccagataaatctgctcaaggtcatgatcctgagaaataattccacagataaagcctacaaattcatctgcgttgatgatcggatatccggaaacatcgatcagacgaatcttattattcagttcatacatgtgctttgtgcttttgtctaagtaaacaatgctgccatttacattcttaattgcgccgttcactttgtctaacagtacttttgttttgcccttgcctttctttcctacgatcagttcaaccatcctgttttcctccttagacacaatataatattaatttttaacaaaaacttttattaatatgtttcaattatagtgcattttatcataaaattcaatgcctaattctgaaaaaattgtgttttttctaagttttttattttgcgttggcattttcaagaagggaactcatctgctggtaaagaagctccttagtggatgcgcccatgacaatggaaacataaggatcgccataagcattctggcttaaaagcgccagacagtttccggcatcgctggtggttccggtttttcctcccagcacagtaatgcccttgggagcagttgcctctccggtcagataatggtcggttgcagtcagaggcgtatttacctctgttccgtcgctgcttttataggaaatggtataggagccaagctgagtgatctgagtaaattccggaaatctcaatgcttctttcagcatcaggtaaatatcatagggtgttgtataatggttttcatcctgaagaccgtgaggatttgtaaaatgagttccggtacatccaagctgagcagcatagctgttcatcatatccacaaatttttctgtggatcctccgatatgagtggcaatggctgacgctgcatcatttcccgaatacacaagaagtccgtgaaccagttcatccatagtaaccttatctcccacctggaaaccgatcacctgtgaaccctcttccagagtaatgttttcttctgagatagttaccacatcttccatatttccatactggaatgcaagaagagccgtcatgatctttgtgatactggcaggatatactctgtcataggctcctttggaatacaatacctgtttgtttttgatatccaggagaagtccttcctgatcttcttccagagctacagtatcccgaagagtgtctccggaaaccacacacagttctgccgaaaaaccatccgcctttccctctgaaccggctatccgggaatctgagaattctccggaagcgctgtacttttgtaccggtccccggaaaaatgtctttttgatcataaacacagcggctcctgctccggcaagaagcgccgcgatcagaagtaccagaagaaaggtgcggatgattttttttcttcgcatctgtcttattcttgctgcttttcttttccgggcggctgacgaagaggcctgtgctcttctttgcggttcctgcttttgttcctttgccggagcagaccagtttccggaatttctgcgtacttttttatccggaacagtatttctctgtctttcggtatctgtttttcgtctgcgaacaggctgttcgtttctcataaatactcctctttcttatctgacattgttttctgaagttctttattatacaagctgctctgaagacctacgttcagaacaagtcccattccaatataaagactgataagagaggtcagtccatagcttacaaagggaagaggcgttcctgtattcggccccattccggtggctacgcagatattcagaaagctctggaaagcaacgatacttcccattccgcagcagatgatttttccggacagatcctttgcccgaagtcccatacggatacattccagagcaatagccagaagaagcaggataatggtagtacatccgataaaaccgtattcctcccctgctactgcaaagataaagtcagtctggttctccgccacaaagtttccttcatttaccgatgccaccgaatcgccggacagtctttttcctgtcagctccccggatgcaatggctgtcttggaattatcctgctgttgggtgtcatctgtgtattcttcattttccggataaagaaacgccataatacggtctctctgataatccttaataagcttctgttccggctgtaccacgatcataagaaagatcaccagtaagggaactgcaatcagaagcgctcctccgataatacggtagctcagtccggcaatatagatcagaacacagaatactactgtgatcatgatcgtatttttcagatccggctgatccaggatcagataaagaggaactgccaaaagaactgctgactttgccagtgtacggaagctgttcagatcttcttcatgatccataaaaaacctggcaaaaaagagaatgatgataattttggcaagctctgtaggctggaaccggataaaaccgaaatcgatccaacgcgccgcgccgtttgctgtatctccaaaaaggcgtacgatcagaagaagcacgatattgctgccgtacatgatccactgaaagtttgagatccaggaataatctatgagagacaggatcaccatgataaccagacccatgatcacacccataagctgcttgagcatcagatcctcacgggcagtacctaccagcaccacaccaatggaactgatggcaagcagaaacagaagcagtctgaaattgtaaaaacgaagcttatactgtttaatcattttgtcctttgttccttttttgacctgacaggaatgtccgcatgaaaaacaggaggttcctgagtgatgcggatcttaacttccgtctcgtcaattgtaatatatttttttactgtatgtatcatatcgtttttcagcattctcatcatctgtggagagcagtcgatccgttccgacaccagaagcattttcattctgtctctggcatagcctgcggagcggccttttccctgtaaagcggttttcaacagaataccctcctttttctgcgatcatgaaattattttctgaaaatctgtcccagcctgcggaacatgccttttttccggcggatttccataaatggaacctcctcgcccagaagacgtctgcagatgtttttgtattcctcttctgcctgagactttttgccggaaagaggctctccctgattggcagccacaacaatctgctcgtcatcaggaatggttccaataaggtctactgccagtatctcaattacatcgtccactgacatcatatctcctctggcaatcatatccggtcttaaacggttgatgatcagatggatatctctcagccctccggcttccagaagtccgataattcgatccgcatcacggatggcagaaacctccggagttgttactacaagggccttgtctgccccggcaactgcatttttaaatccctgttcgattcctgccggacagtccagaagaacataatcaaattcttcacggagctcctcggtcagtttgatcatctgctccggagaaacggcagacttgtcctttgtctgagcggacggaagaagaaacagctccggatggcgtctgtcatggatcagagcctgtttcagtctgcagcttccgtttatcacatctacaagattatatacaattctgttttccagtccaagtaccacatccagattacgcaggccgatatctgtatccactacaaccgcttttttgcccatcatggcaagtcctgtgccgatattggcaactgttgtggtttttcccacaccgccctttccagatgtaataacaatgacctcacccatgtttctgattcctcctaaaagatatgttccataattctggttttctctctggtattttacaccggactgatatcagtcattggatgtattgctgacatccgtggatgcatagccggtcagaatagtatccttatctgccagatcaaaaatgtattccataatatcatttgctgtggtgcaggcatttcctgaggaatatccattggcaatacggactgcaaccgcatactgtggctggtcagaaggcgcatagccgataaaaaggccgtggttcggctgtcggtagtcaatttctgccgtacctgtctttccggacagcgccacgcccagtccgttaaactgttcgtgggtctgtaccacacggcgcataccgtcatggatatcttcccacacatgggacggcacatctgtcatttcgctttttacaacagtttcatatgttttctgtgtctgtccccgggaatctgtcaccttatccagaagagacaggtcgtacacggttccggaggttgccagagctgttgcatagcgcgcaagctgactggttgtataaagatggttaccctgtccgatataggacggaaccgccttactgtccgaaacgtgaggagtcgcctctgaaatttcaattcctgtgttttcatccagaccaaactcctctgcatatttctggagcttggaaagactgagattttctgaaaactcgtctttttcgttttttccggcctcaaatccgatcatgttaaaataatagttgcaggactgttcgatcgctcctctgatctcaagagagccatgtccgcttttgttccagcagttaataggcggattgaccagatcaaattttccggtacattcaatgtaagtgccgtcgtctatgagattttccatcattccggtcactgccgacagaagcttcagagtggaacccggagcagttgtctgctgtgtggccttgttaaagaagggactggaaagatccagggaaagcctggtgtagtaatctgtatccatctcattgctgagcctgttattgtcatatcccggataggatacgcaggccactactttaccggtatttacatccgtaaccacagccgacgccgagcatggcttcagtgcaagctgtgcaggctcaatctccaggttggcgattttattgatcataaaatcataggaattaagctccccggatgcaagccgggaataggcttcgtcctcttttgaaagaacaccctgctcgtaaagcacaaggcagagatcctgaccggaaatctgatcgttcataagcagatacttgtacagaagcttggaaaagccaagatccgttttcagataatctactatataagaggtcatggcctgatagatttctgcagaatccaggtattctcccttcggagaaatcacagaaatatcgatccagttctgtcccgcagcataattcagatattctctgaggctgatgctttcttcttctgcccatgccagataggtaggatcggaagtgtcaaccgcatctttggagataactcccagagtatctctgagcacagtgtcgcagatgtaagtaagatattcctgtacttcttcggattcatccttatatgccggcggattgtcgcctgtcagcctgttagttattgtatcaaaaacttcctgctgcttttgttgaaatttggcatataaatttttttctgtatcggaagcatcctggtcattgaatttttcaatatcaatgacactgtttgctaccagagcattgtaaacgtcataaatcggcacagaaatctggctggcgtcttttacaccctcaaaatcaaacttttttgtattttcaatacgggtcaggagcactcctgcaacacgctgtttcagaatctgataaatagcactctgccagtctgaatcaatggacagatatacgtcgtctcctgcaacaggcggcacaatggtgttttcgtcaattttcagaacttttccgaggttgtcaaccgttaccgtttcctgtccgtctgttccgtgaagaaactgttccatatactgttcgattccggcttttccgatcacggcatcgttggaatagtcgggattttcttttttcagagtttccagttcctctgcagacgcccgtccggtatagcccagaaccggtcccatactttcatcatcaatatactgacgcacagaatcctcgatcacgtcaattccctgaagctgactttgattttccataaccgcagccactgtgctttcgcttacatttgtggcaatggtaacagccatatatttctggaaactgtttgtgttaagcttgtagcgcatggaggcaatatccagaatttcctgtttggacagctcttttggaagtccatactgctccagctcctccggcgcataggcatcctcaccataaagaacaatagaaaatccgtcgcttcccgtcagataattcatcatatcttctgcagtggcagaagcctgctctttggtaagatcatcaatcagaggatgaccgtagatgtcggccttaaatctgctgagcgtaaaaccttctcctacatcaaacgcgtaatttccgttttcatcaagtgcaatgtggaagtcaccggaaagactgtctccgttttctgacaggatctgaagaacccggtatgctactccgttcagggtcagatttttttcacgggtggtctcatagcttccgttatcctcaaaagtcagggaataggacagaatattggaagctaccatttcgccgtttctgtcataaatatttccccttgtacttttcagcacacgggttttggtgatgcggttttcaaattcgctgatatagttttcaccctgaatgatctgcagttcaaaaatctgccggatcaggataaatgccattgcaataaatacaaggatcaccacagttgttcgtttcagttgaatttttttaatcagtttttttattttagtacccaaatagactcactttctttcctgacgggggtcataaaatgatgattgatataataaaagatcctgtatacgatcaccgtcagaaacacggtataaacaatttcaggaataataattctgtacagataggtaaacagattcatacgtcctcttaaaaggaactggaatccgtagacagccagattataaaagaaatccatggctgcagtcagaaggatgggaaccttcaggtcattatcataataaatacgataagtatatccgctgataaatcccacatacatatagatcagcgcataaaatccaagaatagagccaaaaaacagatctgtcagaagaccgcagaaaaatccggtccacattccgctttttcgcccgcgcatcagtcccatggagctgcacagaatcagaagaaggttcggtgtgatggagccgatagaaacagaatgaagcacagtggactgcagaagaaagcagacaataatggtaaaaaacagaaccagcttacttttcattattctgcctcctttgcagtgtcctcttctgaggcttcgtcaccttttttctcctctgcttttccctgcacggcatcctgtttgttggttgtgatcacaaacacgtctttcaaatgctgaaaatcaaccggagtaacaagagttcctgttttggtcaggttatttgtatccagttcgatctcactgacgtatccgataaataatccttccacatacttgtcactgatattggaggtaacaattctttcgcctacagaaaccttgtcttctctgtcgtaaagctgactgaacctcagctttccttcgtcgatcagctcaagatctccctctaccacacagatatcgtctgtacttacggtcatggcgctgacattgctgctgtcatcaataatggagcggacagtagcccagttggagcctacctcagtgacaatgcctaccaggccttttccggcaattacattgttgtccacgcggataccgtcattgcttccgcggttgatcataaacgtatcataccagtttccgggatctttggaaatgatcctggcagcaaccttcggatagtctgtatattcctcatccagctcatagagctgctccagacgggcaagctcagcctgatcctgcaaaagcacattgttctgctctgtgagagtgtctaccgttgtctgcagttcctcattctgctggatcagatcctctttttcccggaagctgtcctgaacgccggtcatccactggcctatagatgcaatggatttttcaaaaggaacaataatcagcccggctgcttcctttaaaggtgctgaggtcacaccggaggcaagggtggcgacaatggcgctgacgcagaaaaaggtcataattgccagaagatgtttactttttaaatgaatacgaaatcgaaatttctttttcaggtttttcatggatcatacccctaaaaaattataatttacgttgctttacaggctgcgcccatttttccagttcccggttccggatgatcttttccaggccgcttacggaagaggtttcataaagctgggaaagccggaaagaaaagccggtatagcttgcaaggtaattgtctatgtacggaagccgcgtgcttcctccggtaagataaatgccctctctggaaatatgataagcaatctgcggaggcgttctttcaagaaatgttttcatttccgcagcaatctcattgacacagttcataattcccgcgttgactacatatccggaaatgatctcttctcttggaagcccggaaatactgtcgattcccacaaccttgcgggcgtcctttttctgatcgttcagtctgcccatggcaagcttcagccgtttccctgttctggttccgatctgaaggctgtatcgctttcggatctcgctgcagatggcttcgttcatctgtcttcctccaatgggaatctttttggagataatgatctttccgtctgtaataatggaaaactgcgtgctctgcgctccgatgtttaccaccatgcttccgggattatcctccagggtgattccaagggcaagagcatctgcaatgggagcttccaccatatacacccggttcttccggagccagtggccgttggccacatgataatacgctcttttttctacagctgtcatatcaaggggaacggaaaaaaagatatccgagccgatgccaagaaatttatcaatttttttcatcatactgtaaagagcaatttcctgaagctcaagattggcgatcataccaaaagccatcggcgaattaacaacgatatcaacaggtgatttttcaaacatatcgtatgcttcattgcccacggcgatgatcttgcgcccttttgacgcaatcatgtttttttcaagataggttttgtttctcagaaaggaatagaccttaatggtactgcttccaagatctattccatatgttttttttatcagcataaatctgcccctttatctcatcattccccgttctttgaagctggtgtaactgcgatccccgataatgatatggtcaagaagacggattcccagtaattctcccgcctcatagatccgctgtgtgatctctctgtcgcagccgctgggttccggatctccacccggatgattgtgaacgagaatcagactgactgcatggcagcggacagcctccatgtatatttctctgggtgtgacaagggtggcgttcaccgttcccttggagatcagtctctcagacagaagatggtttctgttgtccagcatcatacagatcaaaagctcctgctcctgatgacggagcctttccatgtaataggaagcaatagaatccggatgatgaaaacttaaagacggctttgccgctgccatggaaatgcgtttggacagttccccgatgcatttcagctgaacagctttcacctttcccaccccgtggattttttcgagatccgcgagagaactgtgaataagtcccggcagtccgggataggacgattcctgcatatgcttcagtatgttatttgccagagcaagagaactgcacccttttgtgccgcagcgaagaattactgaaagaagttcactgtcacttaaggtttcttccccttcacggatacatttttcgtagggtctttctgtctccggcagatccttcattgtttgtttcatatggtttacctgctgttctctgtgcaggtccaggaaagaatcaacctttattctagcataaaaagagagagatgtatactctctcctttgtttttttacaatttcatcatatattcagatgcgatccactctgcggtttttattccgtccatggctgcggaagtgatccctcctgcatatcccgcgccctctccgcagggataaatgcctgtaatgttggaaaggcctttctggtctctcaccagccggaccggcgaagaggtacggctttctatgccgcttaaaaccgcgtcttttctgtcaaagccggaaagctttttcccaaaggcaaaaatgccttcttcaatggaatccccaagctctttggggagaatggaacgcacgtctgtcagaacatagccgcctttgatgtttggatgaatctctcccagttggctgcttggctgatgcgcgcagaaatccccgaaaagctgtaccggaacctttccctttccaagttcccaggcttttttttcgagatcgcgctggaaggcaatgcctccaagagctccctcttccggaaaatccttcggagtgacagttacgatcagagcgctgttggcattttctccgtctctggcctgatagctcatgccgttgactgccagaagcccctgctcagaagaggcatttaccacatagccccccggacacatacagaaagagtatacgcctctgccgttttcacaggtgtgggtcaccttatagcttgcagaaccaaggattttattttccggttctccataaagatcctgattgatcatggactgaggatgttcgatgcgaagtcccactgcaaaggctttgggctccatggcaagtcccctgtccttcagcataaaaaaggtatcccttgcgctgtgccctacagccaggacacatacctgagccggaacctgctctgtatggttgatctccactgccttcagctttccgttttctgtataaagatccgttactttggaacggaaccggaaggttcctcccatttcttcaatctggcgtctcatagtctgaacgatgtttacaagtacgtctgtgccaagatgaggcttctgctgataaaggatttccggatcagcgcctgcttctgtgaagcgcttcagaacttctcggtttcttccggaggaatcttttacaagagtgttcagctttccgtctgaaaaggtacctgcgcctccctctccgaactgaacattggattccggatcaagaacaccgtttttccagaaccggtttacagtctccattcttttatctgcctcttctccccgttccagaaccagaggacgatagccggctctggcaagataccaggcgcagaaaagcccggcagggccgcttccaacgatgacaggtctggtttccaggggctgatcgcccggtttcggaaaagaataatgcctctcgttagttgacataacattattaccgtgaacttttttgaggatttttttctcattttcagctttcacatgcacagtatatacgaattttttatcctctttatggcgggcatccagagactgccggataatttcataagaaaataaagtttcaccgcagcggagagtttttttaatcttctgtctcaggtctgcttccgtatgactgatcggaagcttcagctggctgatctgtatcatataagctcctttgctccgtggattccggccacggctccgctggaccatgcccactgaaggttatagcctccgcatgctccgtcaatatcaagaagttcccctgcaaaataaagacctctgtgaagtctggattccagagttgaaggatttatttcatcggtagcgactcccccggagcacacctgagccagatcaaagcccagagaatcctttacggtaagtttaaagtccacagcagatctcaggggatccttctgcttcatcagaagtcgtacaagcctgtccggaagaaggcctgcaaaaagctcttcttcagttttatagggacagagttcttttctttttttcataagccgcttcagtgtttcttctgtgtattcaggcagaaagttcacggaaagctgaacctgttttttctctgccagagcccgggttgcatacctgctcagctgaaaaacagggattcctgaaattccatactcagtaagctgaacctctcctgtttcctttcctgacggacttccgttaataaaaagctgaactgccgcttctgtacggacgcctgcccacagagaaagactgctgttctgacatttcagtcctgtcagcgccggaataggctttatgatctgatgccccagttcactggcaagagcatagcagcttccatctgcgcctgcaactgcagaggctttggagcctccagcaagaatcaccgcgcccccctgataagtccaggtttctgtctgtacattccagagattgtccgaaaaaaatatcttttttacatgttccagggttttgatctttactttcaggcttcgggctttcatttccagaagctcgggaacacattttgcctgcccgcttctgggatacagccagccttttcgttccgttgtcagaatcccgatttcctcaaaaaaatcaagggtgtcttttacagaaaactgttcaaaggtttctctgacaaattccggatgggttcctctgtatgctccttcgtactgatccagattagtaagattgcatcttccgtttccggttactgcaattttccggcctgttttttcattgtgctccagaagggtgacaaagactcccgtttttgcagcctgaacggcagccatcagtcctgcggcgcctccgccaatcacgatcagagaacgggacgggtccacaggcttttttttcttttttgcaggctgattttctttcataaatacctccctgactggtgttatctgcaatcctgtaaaatcatggaagtgtgatcagatgtttgtccagaagcttctgtacagacatcaggattccaagcttcgcatgctcccaggtcagtcctccctggaagtaaactgcataaggaggcttcataggaccgtctgccgaaagctcaatggaagagccctgaacaaaggctcctgcggccataatcacctgactgtcatagcccggcatatcccagggctccgggtccacataggaatccaccggtgcggcagcctggattcccttacaaaaggcaaccacacgctccggttcgcccaaagtcacagcctggatgatatcctgtcttggttcctgtccgtttggaatcacagggaagcccagtttttcgtaaatgtttgcggcaaaaacagctccctttaaagcaccctttgtcaccataggagccaggaaaaagccctgatagaaggaacggttcacacccagagaagcgcctacctccatgccaagtcccgggcaggtcattctgctggctgcgttttccacacattcctttgttcctgcgatatatccgccgataggagcaagaccgcctcccggatttttaatcagagaacccacgatcatatctgctcccacatcacttggttctacggtatccacaaattcaccgtagcagttgtccaccatacagatcacgtcaggcttaatgctttttacaaaagcgatcagttctccgatctcctttacagaaaaagaaggtcttgtctgatagcccttggagcgctggatctccaccagctttgttttttcgttgatggcttcccggatcctgtcatagtcaaaggttccgtcctccttcagatccacctgacggtaggtgacgccgtattctgcaagagaacccctggccggacggattccgatcacctcttccagagtgtcatagggctttcctgccggagctaaaagctcgtctcccgggcggagatttccaaataacgcaatggcaagagcgtgggttccgcaggcgatctgaggacgtaccaggcaggcttctgtgtggaaggtatctgcataaaccttttccagagtatcccgcccgaagtcatcatagccgtagcctgagcttccgttaaagcactcggaacttaccttgtttttctgcatggcaagcagcaccttcatctgattatattctgcttttcgatcaaattcctcaaagcgctttttcagagatgtttccacctgtgcgccaaaattataaacctcttctgaaattcctaactgttcatatatttctttcatcatgcaacctctttttctttattcaatcctgtattcttacaggtgttcctgcaactgcaggtcagttcctgccggagtatgcgcggcaggcttcttaatatgcgggtataacaaatattaaaatccggttcctgtctgtcctggttttacagaagaatccccttctttctgcatatttccagcatatagtcaagaatctgatcttcctgataggaaaactgatctttgtttacccaggttacctcctgttctctccgaaaccaggtaagctgccgctttgcaaaatgtctggtatccctcttcaacactctgacagcttcctcaagagggtattctccgtccagataagcaaggatttctttatatccaagtccctgcatggataccattcctctgtggcagccctcttcctttagcctagacacctcttccagaagaccttccttcatcatctgatccacccgaagatcaattctttcataaagaagctcccgtggcatattcagcacaaaataagccaaattgtagggactttcatgctgtttctgttcttcattgtgagcagagatgggagaaccgttctgatgataaaactcaagagcccggatcacacgctttacattgtgggcgtgaatggcatctgcgcttacaggatccacctttctcagcatttcatggagatgctccccgcctttttcttctgcaagagcttccagttccttccggtaatcattttcctgctgagcttctgtaaaatcaatatcctttgtaactgcctggatataaaacccggttccacctaccagaatgggtatttttcctctggaataaatatcctccatggctttttttgccatctgctgaaattttacaatatgaaattcttcctccggttccagaacatccaccagataatgaggaattccctgcatttcttcagatcggatctttgcggaaccaatatccatttttttatatacctgcatggaatctgcagatatgatctctccgtttactgcctttgcaagggaaatggaaagacttgtttttcctactgccgtcggtccggtcagtacgatcaagggctgtttcatatggctctcctaaacaattcgtttgaatttcttttccagttctgttcttgtcatggaaataatggtagggcgtccgtgaggacagtgataagggttatccagggtaagaagctcgtcaataagcttttccgcctctttcgctgacatggcgtgatttcccttgactgctgccttacatgccatagtcgccagtctggatgcaaaaatatcaagggcatccttttccccgctgccggatagctgatccagcatttccagaaacagagcttcttcgctgaacccgtaaagagtggctggaaccgcgctgatccggtattcttttccgccaaattcctctatttcaaatccgaactgagaaaagtatttctgattttccttcagaatgttttcttcctgaagatttaaggttacgatcagaggcggattcagatactgggaatccacggtcttttcctggaagctttttacaaggcgctcataataaaccttttcatgggcggcatgctggtcaataatataaaaattatccccaaactgcgccagccagtaggtgtcaaagatctgtcctacaaggcggatacgttcccgggattccggagcaagaagcttttcctcaaataattccagctgacggggctcctgggctgtcatttcatgactgttctgatccgattctgctgccgaaatccccggttcggtttccacactgattacagtttcaaggttctgagcagtcttctcgggagagtcactggtgtgtgtaatttccgctggttctgaaagaaaatccccggattccggtttctctttttctgaaatccagtgctcttttttctgatttgtgttctgtgataccgggactgtatttttcatctgactgcggccagtattttttaattccctgttttcttcagccggaagctttgtttctgtttcccgtttcagctcctcttcctgcttttcacggagagttccctgaaaaagatcttcttccgaggcggaaaaaacctgaggcttctttgtttccgttgtatgagaagcgctgtacgaaacggagggttcttttacggtactctggtaagccggccgttccatccatgactttgttttttccgggacaaaagcgcctgctcctgcataagctctgtctccggatattccggtttccttaatttctttttctgcatgcccgcaaagctgttctcttctttttttctcaaagggctcaggcacagatgacggcttaacaggctcctctttttttacaggttcggactttccaagagttacctttggtatcatctctcttcccatcagcgccttgcgaacagtatcgtaaacagcctcataaacctcctgctctctggcaaaccggacctcacgcttggcaggatgcacgtttacatccagatcatttccctccatctgcatctgaagggacacaaaggggaatttatgctgcatcagaaaacccttgtaggcgctttctatggcttttgtgataatgttgttttttacataacggccattgatataatagttttcaaagcttcgatttcctctggcaatttccggttttcccacaaatccggtgatcttcataaaatcattttcaaattccgcgtccagaagagcctttgtgatatccctgccgtaaacgctgtagatcacatcctttacactgtagtttccggagctgtgaagctttacctgccggttctggatgtatttaaaagaaatttccgggtgggacagggcaagctgttccattaaggtatggatgtaattggcttctgtcatgtttgatttcagaaatttgcttcttgccggagtattataaaaaagattccgcaccaggaaggtggttccctccggcgctccaagctcttccagagagtgttccactccgccttcaataatatatctggagccgctgactgcagacggagtttttgtgatcagctccacctgtgacacagccgcgatactggataacgcctccccgcggaatccaagagaagcaatctgttccagatcctccactttttcaattttgctggtggcatggcggagaaaggcaagaggaatctggtctgcctcaatgcctgctccgttgtctgtaatacggatcagcttctttccgccgtctgtgatctccaccgtgaccgccgtggctcctgcgtcaatggcattttccaccagctcttttacaacagaagaggggcgttccaccacttctcctgctgcgatcttgtcaatggtattctggtctaaaactgcgatctttctcaaaccaaacctccctttcttcctttctgccggctttgtcctgaaagtcttttaccagcggttctgtattttattctgaagattataaagaatattcatagcctccataggcgtcagatgagacatgtccagattccgtatctcctccacaatatcattgtcctgtacggtatcaaaaagagacatctgcgccatatccacctggtcgtacacaattttctgctttttctttgaggaggaagtaagatccttaactgctgccgtaatgtctgcatcacttaactcttccaccagctcttttgcccggcagatcacagagtccggcactcctgcaagcttggcaacctggattccatagcttttgtctgctccgcctttgacgatcttgcggaggaaaacaatatcatcgcctttttccttaacggcaatgcagtaattgtttacgccggaaatttttccttcaagctctgtcagctcatgatagtgggttgcaaaaagagtttttgccccacagagctttgtgtcgctgatgtgctcgatcactgcccaggcaatggcaagtccgtcaaaggtactggttcctcttccgatttcgtccaggatcagaagacttctggaagtggcgtttctcagaatattggcaacctctgtcatttctatcataaaggtactctgaccgctggcaaggtcatcagaagctcctactctggtaaagatcctgtccacaattccgatatttgccttgtctgccggaacaaagcttccgatctgagccataagaacgatcagggctgtctggcgcatataggtggatttacctgccatattgggacctgtaataatggatacccgctttttctgattgtcaagataagtgtcattggcaataaacatatcatgctcgatcatctgctccacaaccggatgtctgccgttttttatatccagaacaccgctttcattgatcttggggcgcacatagttatttctctgggcaaccagggcaagggatgcaaaaacatcaagggcggcaactgccttggcagttttctgaatacgcacaacctctgctcctaccttgtctcgcacctcacagaaaagctcatattccagagcataaagcttatcttctgcccccaggatcagatcttccaaatcctttaattcctgagtaatgtagcgctctgcattggtgagagtctgctttcttatataattttccggcaccagctccttaaaggaattggtgacttccagagaatacccaaaaacacggttgtatttaatcttcagactttttattcctgtgcgctctttttctctgacttccagctctgtcagccattttttgccgtctgtacgggaacgacggaatttatccacatcttcatgatagccttcccggataatgcctccgtccttctgagccagaggcggctcatccacaatagcgcttttgatcagagacgcaatatcttccagaggatccatgtcctcataaagctctgtaagaagaggtgttttaaaatccttcaaaatctgccggatatgaggaagcatttcaagagaggatgcaaaagcaatcaaatcccttggattggcagactgatagctgatgcggctgatcagtcgttccagatcgtaaatcggatttaagtattcccggatctcatccctgagcatgggacttttattcagttcttccagagcctccagacgccggttgatctcctgagcgtcaataagaggctgttccacataagagcggagggtacgggctcccatggcagtttttgttttgtccagcacccacagaagggaacctcttttatttttttcacgaagggtttccaccagttccagatttctgcggctggagctgtcgatcagcatgtatttttctgccgcatagggacggattcccgccatatgggaaagcgctgatttctgagtctcctgaagataaagaaacagagcgccggaagcgatcacgccgatgtcatagtcctggatccccaggccttccagtgtattcacatgaaaatgctcttttaaagtccgcttacacaggctgtcatcgaaataccaggcatccagagggaatacacagatacccagacggtttttcagatcgtctgtatccacgccgctcataaaaaacgcatcattgcaaatgatctcggcaggaacaaatttattgatctcgtccagaagcttctgcggtttatctacttctgtgagaaaacagtcgcctgtggaaatatccgcgatggcacagccaaaatgatcttccatagacacaatggacatcagataattatttttggattcatccagagaagctgcatccagagtggtccccggagttaccacacggatcacttctctttttaccagtccctttgcttttttcgggtcttccacctgctcacagatggcaaccttatagcctttttcaattaatcggttaatataggtttccgcagcatgaaaggggaccccgcacatgggggccctttcttccagtccgcagtctttgcctgtcaaggtgatctccagctcttttgtaacggtcagagcatcctcaaaaaacatttcgtagaagtcacccagacggtagaataaaatacagtccttatactgctgctttgtttttacatattcggccatcattggtgacagtttcttgatgtcaatagttgtattttcgttttctgtgtttatatttgtattcaagtgcttcctacctcatatcttaagtaaaacaatatttctgacaaatattgctgtaatcctgtatttaatcagtcctcattctaacacggaagaatggaattttcaatactcaacaaccttacgttttcttagttttgtccatattagctgacaaatcgaaagttaaatgagctgatatttctatcagcccattgtcgtatctattggggtgaaacattttacagacaagatttctgtatttcttcgattttcccaataaatttcctgttctttatttaatacttttgtttaaacaactgcttctataattttgtttctgcttttccttatttcattcccctctcctgaacaccacctgattttctttgattgtcagcagtactttaacatctgccagatcttctggctttgctgtcagtggattctggtctaataccacaaaatctgctgttttgccaggtacaatggttccttttgtatcttcctcaaaatactgatatgccccgtattttgtgattgctttcagagcctccagaacagaaattttctggttttctccaatgcttctgccttttcttgtgatgcggtttacggcgcaggaaactgttttcatcatgtccggcggaattaccggggaatcctgatggaaggtatacttcatatcatatcctatggcatcctttaccggagagatctggcttccgcgcttttcaccgaaattctttaaatgaatgtcgccccagtaataggtatgagccacaaaaaagcttggaatcattccaatctctgccatacggtgaagctgttctttttgtacaagctgggcatgtaccataaccgctctgtggatatccttatcctttcttaaagccagctccttttcaaactgagaaacatactgctctgccgccgcgtctccattgcagtgagccaaaagctgctgttttttgtcaagtgccaggccaatataggttcgcagctgctcatctttgtagatgggatatccgcaatagtctttttctccctcatagggctctgtcatccaggctgtcctgccctgaggtgaaccatccagaaagattttatatccgcccatctttaaatgattgtgatactttccggcataatcattttcttcctctataagctcagaagctgtggtaatatcaagatatccgactacatcgagatgcagcagtcccatgtctgaagctgcttttaaaagctggaacaacggctttcccaccattccgtcctgaacggttgtaataccatagctggcataaaccttctgggcttccacgatcagatccataagctcctgtggtgaaccagcgggaattccggactggaatctgagaaaggttttttcttccatatatccgtcaggaatctgcgtaccctccatgcgtccgtaacgtccgtcagaagtatcctctgtatgttcgtcaattccctgaagctgaaggcctttgctgtttgtcacgcccatatgggaggatgcgtgaatcaaaagaaccggattttccgtactgatctgatccagaacttctctgttggggtggcgcccctccttcaaaaaattgtgatcgtaattgcagcctgtcagccatgcgtcttctgaaagattcttctgggttttgaaggctttcattgtatctataatgtcctgaaagctttcgcaggaagaaagatcgcactgtctcattgcatttgccacgcccacaaaatgagagtgtccgtcaataaatcccggaagcaaagtgcctccgtgaaggtcaatgatctcatcctgctctttatagagcttcataatctcatcctgatcaccaactgcaaaaatcttcccgttttctgcacatactgcttctgcatataaggcatcatcttccatggtgataactgttccgttaatataaaatgatttcacagaaattctccttttttttatatattttaatcttcacaacttcttcatacatctttcccaatatctgcataatatgcgactgtttgaacaggctacatacacatgaaaatattatctgtattttccttgtatagaataaataaaagtaaaaaatcagaagagaccagatttgaatccagtccctcccgatagagtgcatttattgatatctctttccggttctcagatttctcgtgtagcttctttcagccactgtttttcctcctcattcagataaggagaaatttttttataaacttctgcatgatactggtttaaaagctctttttcatggtctgataaaagctccggaacaatgccgtccagatcaaaaggaaccatggtcaggttctcaaagcacatgaactgtccgtaagcagtcttttctgcttttttacacacgatcagattctcgtgacggataccgaattcattctctacataatagcccggctcgttggaggtgatcattccctcctccagaacacaggcagattgtccgggagctgttttccagcggaaacggtttggtccttcgtgaacgttcagaagatatcctactccgtgtccggttccatgattatagtcttcacctaactgccataacggttctcttgcaatgtaatccagattaagatccgtacatccataacggaattttgctgctgcaagattcagatgcccttttaatacaagggtaaaatattttttttctttttctgttaccgggccaaggacaaccgttcttgtgatatcggtggaaccttccagataatgtccgcctgtatcgcacagtgccagtccgtgaggctccagaggaatatctgtttccgacgacgggctgtagtgacagattgccgcatggcctgcataggaaacaataggatcaaagctgttgtccaggaagttttcctgctccttgcgaagggcaaataaatggtctgccgcgctgagctctgtgatggttgtttttcctacgttttttttcagccagtagataaattttgtcacagctacgccgtccttgatgtgggcaatgcgttcattttccacttcaacaggatttttgatggcctttggaagaagggtaaggttttcctcatccagaatcttcacactgtctggaagactgcttaccaggcggctgtttgcattttttctggaaagaagaaccgttctgctttccggaatagtctttacatactggtaaatgtcattataaggtttaagaaccacgccgtctttttccagagaatttcttaccgctgtatcaaaagccttctcattggcaaaaagaaggatctcatcctgtgtcataacaagataggaaagcactaccgggcagcagtgaatatcatttccacggatatttaaaagccacgcaatatcgtcaagggaagtaagaatgaaagcatccgcgcctttttcagccatcttatctcggatctgcgcacatttatctgcccttgactttcctgcccatttttcttcaagctccataaccggctcacaggaaagctccgggcggttcttccagatttctccgatcaggtcgtcctctacggaaaagctgatatttttgtctgcaagaagggatttcagttcctctgcctcggcagcgcttacgcatcttccgtcaaatccaaggcacatgccttctgtcagcttatccttcagaaattcgtgaacggtaggaacctttggctctcccattttaaaaagtgtgacagtggttccttcaagctgctgggcagcctggataaaatatcttccgtctgtccaaagtcctgccatatcagaggtgatcaccgcggttcctgcagaaccggtaaaccctgtaatatattttctgcatttaaaataatcgcccacatattcagagccatgaaagtcgtctgtgggaaccagataagcgtccacatgtttttctttcatcaggcttcgaagagcggcaagccgttcctgtacggtcattctttccatctcctttgtattgatactggtacagagaatacgaaataaactgctgtttacacagcactattttgcgtggaaatccccatggaattttagtattccctctactggtaagtttatcacaaatttcgttcatttaaaaccctacacgccaaaatattcatccagctgctttttaaattcctcaggaatgttctgtggaaacggcatgctgtcaatatcagaaaggctttctgcaatgtgggctaaaagtctggcgcttctttccagggaccaggcagaaagtagttccacggtatcgtaatgagtatgcattccaaagccgtctctgtttaaggtcatggcagggattcccttccatgcaaaggtattggagtcgcttccccagatctggttctttgttgtcatgccgatccctgtctcacgggcaaggtaagtaagcatggcgcacacagacggatccgcggtaacgccgatcacgtttccgccaacaagctggccggcaagatctacattcatgttgaatctgtgctgattcagctcctgctggtgaagctttacataatggcggcttcccagaaggcctttttcttctgcgccaaaccatacaaattccacggttcttcttggctgatgctcctttaaataacggcacacctccataataatggctgcgcctgccatgttgtcataggctcccggaccttccggaacagaatcgtagtgagcggtaagcgtcaggatctcgtctgctctgtccgtaccctggatccttgcctccacattgcgggaggtgcgctttacttcctcttgaataagagtaagttgtgctttttttgccccttccgttaccatctccactgcgtcaagatagtgaacgccaacaccctggatcagttctttttcatttaaggattcgtataccttctgaggaatggcggcagctcttgggatgcggtcctctccttcatccacaggagaaccgctgatgcttacaaagcctgcaacccctgcttttataaggcgaagatacagatctttccgcacgatctcgttgaccataacgattttgcctgctgcatgagaaagactgatatcgtctccgttttccacatacagaaaatctgcctctgtcccttcttttgcagtgcttccgcatctctgatagccggttgcctgataggttttatgatagggctctgtaatggtaagctctgcttttgtaatctcccaggtatcaaaggaaaactcttctatatgactttccatgccaaagctttttaattcttcccggatcagagaagcagccttttcctctgagggagttccggcctctctgatatagttaaattttgagacaaaatccatctgtcgctgtccgctgattgtgtttttactcataatgtcctctccattgtaattgatttgtgatatggaagttactctttccagccttccatatggcgcacgatcctcttataaaaatcaactgcaggaggaagggcggaaagactgatattttcgtcgattccgtggatgctctgatactgctgttcattgatctccaacggagcaaaacggatgctgttttcacacaccggagtatagaatctggcgtctgtgcctcctgtcatggcatatggagccacgatcacacccggatacatttttttcactacatgttcgatcaggcggaacggctttcccttataatccaccaccgggcagggctgatggatcaggatcggctctgtttcaattccgtatttttcagcgatctttgataccagagccagactttcctccacaccctgatgatggataaagcgcatattacctgtaacagaggcctcctgaggaatcacattcagtccgtcagagcctttggccatggtaaaattaagggttgtggtgatcattgcagctccaaggggatttacctttggaagcagcttttccagaagaggctccagctgtctttcatatttcatgacttttcccagcggtccctctgtataaggagccattcgccggaacatttccgctaccgtaggattcatttttgaggtaaatggattatggttctcgatatccatcataaaagcagccagccgggtaagaggcgtctgcttctggggaacactggcatgtcctccgtttccctttgcggtaaagcggatatcgccatagcccttttccagacatcctaccatggcaaagcggccttttactcccttcatgggctcttccttgatcattccgccttcgtccataaggaattttaaatgtacgccgttgtcctgaagccattttacggtaaggggagctccctctccgccgatttcctctgtacagctgcttgcaaggtaaacatcacactccggcacatagtcctttgagatcagctcctccacagcctgaagaaagcagaacaggctgcctttggtgtccacggttcctcttccccatacagcgccatctgcaatttctccgctgaaagggtcatgcttccactctccggaggcctccaccacatcctgatgactcataaagagaatgggctctccctgtccttttcccttccacttaaaaagaaggcttccgttaaattcgtgtttttcacagactctgtgtatatttggaaacagctgttccagcacttcatggaatctgtaaaatttgctgagatcctgctgaaaggcattggaaatcgtctcgcagcggatcatttttcccagttttcccccataaaacagttctctttcattagctttaccgctcataatgctcctccttatcaaagcttgtcttttttccataaaatatatccgatcagcagcgccattccgcctgccggaatcagcaggatacttgtctgggaaatggctgccggaacaaacacacagagaagagtcatggaaagcagcggaatggctgcgatcttcatactctttttaaaatatttcagtcccaacgcgccaaaaagcgcaggaactaccgtatcaaatgcaggggtcagcaccggattttccagaaccggtgtcagcggaaccagaagaaggactccagcaaagatcaccagcatggtcacaatggagctggacgcaacgctcaaagtagaaataatctcattttccgcagttcccacctctgtttttgcaatatccctggcattcatggcacaggggattttaagatttgtcacatttccggtcaaaaaggtaagatagcttcctccgtttccaagcatgggtgcgtaaacaagaaattccacaattcctaccggaatataaacgatccccaccttgataaacccattgataaatcctttaaagtccgggaaagctccgtagatagcgccaagcataaaaggaactgcaagaagcagaagtgctgcggatatcagcatgatccttccaaggcggtgctgctgtctgttaaattcttccagaaatttttctttatccatatgatcctcctacagattgatcagaacagctgctgccattccgataatcatacttactgcaatactgaagttttccagccactccatttttttctttacgatcaggtattcaaataccgccatagccagggcggaaattcctgccaccagaagaggcgtgctgtttttaaaggctgtccaggtacccacataagaaccgatgtatgcgctgcacagaccgataaacatggcaatggtagcataggtgccaaagccgggtctgccgctgtcatttttcttttcttttttctgtaccttgcccagatattttttcagtccgaaaatgcagcaggtgatgccgcttaaaattccggctgtcataaccagggctatggtagtaaaggcgccaatggacatctcgcttactttaaggccggaaagtcccattccggttgccgcgatctcagccacgttcagctcgtactgtaaagctcccaccacagaaagcctcagccaggataagggaactccaaggcttccgctgagagcgatcacgcccagaaggatactgacgcccggaagaacggaaaaggttgcgcttgacataatggcccgtctcatcaccttcttatccattccaatggcgattcccgcccggtagctttttaccagaaacaccacacacataatcaggataaacaaaagcacgccgcctgtgatcagataaaagggcaggctgtttacctgtttcaaatactcgttcatctctctttcctccacctttgtttattctttacgattttatcacaaaaccatacaaaaagacagaacattttaccggtttccctgccgtaaaatattctgtccctaaagctgttttattttttcagatattcaaaatatgcaaacagtccctcagccataacaggatcgatgaccggaatacctgctgcttcttcaagctcttttgctattccgatcgttgccatgcctgtacaggcaagagcaagcacatccgccccctgttctttcagttttcttgccatattcaccgtacttttcctgccttttgatgtcataagatccagtgtgctgtataccccatccggtcttcctattagaagctggtcggacttaagttttgcataagctttgggggcataatctgtaatcccaagtacaccgattttttctccgtatttccgtgcaagagcaagcgttgtctcaccgcctccggtaaccgggattcccggaagagcttcccggatctcctccactcccggatcgtctgcacagcttacaatgatcatatccacatcccggaagcttttggcagtttccacgattttggggactgcaagcatacaaagctcaggagagtggattccttcatactggtcggggatgcattttgtttccaccgtaagcattggaaaatattgattcaaaagtttttcgtgagccagaagaatatcctgatcctctgttgtcaggactcgtatcagacctaccttgaattttttctccaaaacagcctcctcctttcagatacagaacacgccgtcctcgatgatcttctcattatccagataaagggtgggacgaaggataattccgtccatgtggcactctgccttattcacaccgccaaaagaggtgtttgttccaaaagcaatgtgcacggttccgtaaactttttcatcttcaagaataattccgtttaatatggctgcctcgtttgttccaataccaagctcacagagggttccgtttgtctcatttttcagaagtacatccagattctcgcttttttctccggtaacagaacggagcctgccgcctgagatcaccatgtgaagagggctttccagctttccgatacccaccatggagccgtctatgatcatttctccttcagagccgttctcaagaggcgcaatataagcttccccggaaggaaggtttccacactgtcccggctttttgtataccccggggcttggaacgccgtttcttcccttcagggaaatcttcagaaccttaccgtccttttcaatgcgggcttccgaagcttttgtaagcttttctgtaataacctctgtcagcttttctacctggtcgtaatctgcagtcatcgcccctttggaaaacatttcttccgtgatcccgggcatggtggcaactcttgtacctgcctttgcagcctctatacgggcattggtgtgagttaaagactgcgccgtaggagcaacaaccacatctgcgtttttcatggctgccgcaactgccttcggaggctcctggccgcttaactccctctccttcatcaccatcagaagccgttcgcagccaaggtttccggctgcttcataaagagcttccccgattctttttcttgtatcgtctgtgacaatgagaacctcttctccttctttcactgccagacaggaagaaaggattccctctgctgtttttatcaactgttccattttcttttttatccgattgaaaaaacgatcggattttccctttctcccggcaacttccgggacatctgcgtctgtgtgtagccttacaaatctgtcagttcagaaactacacgggccagaagtgttcttggcagaacaaccttcttaccggttttttgtgcgaacatttttttcatttcctgagtatatccaatgcagtccagcacaataagatctccctccatgccacttatttcctctgccgccttttccagttccccccagtctccgtagggagaggcagctactacgcttactttttgtacataatttttccactttgcagcgcactgctcctcctgaaggggagaaggggtcaggcagataatatgtgagcttttggtaagcagaggaaccaccctgtccagaatatcgcagggatagatcagagggattttttctgtggaaaggctctccggaaagtttcctgtacagaacatcattacaagagcacagccctcttcctccattttctttatagccgcctgaaggcgcggcaggataaagcgttctgcaaaggtcacagaactgccgtctgtaagtctggacaccagaacataatcgtccttttccggcgcaaaggctttgatctcctcttttgtaagaccgtcaagtcctcctgcctggatcagttccacagagctgccaaagatccccataatatcctttgtcacatccactctgggagactgtccgattgtaaccgccccgattttcatattagtcatgcccccttattcgtttccaagagtctgcagatgcttcatgcttccataaagcttctgtaatcttgcatattcctcctcgtcatagaagctgcactgtcctcttccaaaggcctttgccacctcaagcataaagcgggctgcctcttccacgtcagctgcgtgagttcctcctgtagcgcagcccggaaccatagtctcagctgtaatggcaacgcctacaacaggagcatctgttgctgtacagggctgaagcacactgttcagatggtgaacgtcgtttccatagggtgtgatatcctgagttgccagcgggaacacatacggaagctttcctgttgtgatctgcatcagctccagaagatcctcagaggttcttaaaatatatccttcttttactgtaggagaaatggcaaagcctcttgtattgattacacggtttccctttgtggtatctacagaaaggatggcgtcaagctccggagaaacctcttctctgtttacctgggacatttctaccggagagcccataaaaggaaccggatcgtgaggcgctgtaggagcatccggacagatatgggtggaaataaatacgtctccgtccagaatatctcctttattctgcatatccagaagctttgcagcaagggctacggcacagagagccccgtctccgtctgatacaaagccgatccgttccggacgggcgccgattccgccaaggcgtcccaaaagtccaatggttggtgcgtctccaccgttcatttttccgtttttgcccggaatacgcactttcagcatatctgtgcttccttttggacctacaagctcatatacctcaatatttgcatccggcttaatgccaagaaggtattcctttaccttttctcctgtaacataagtgctgtccagcacttcatatgcatcaatgatctgtttcattaacatgatcctgtcctccttattttttaagatagctgatcagatcttttttgatcacgtcctcagttgcttttaaaagctccggttcaaacatggtgggagaaagcttcaggttttctttatctgctgcaatcacataaacctcaaggtcttcctccatcatggctgtagttacaggctcgcctgtctctgcattaattgtcataataagatccgggaaggttgccagtcgcttaccgtttttttctgctgtggcatattcattccagaaggtaagctcacatccgtccactgtggcatatcccacatcaaagccgccggttgtttcaatggaaaatttctccaccttaccttttgcaagtacccgtcccttcaggaagccgcacagctctttcacgccctcctccacagaagcatcaagaccttttaagaatgcttttcctgtttcaatggcaaactgtacgccgccgggagcgccgttctctttcgcataggatacacttaccggatttctggctactgcaaccagaccgcctgcctcaatggaagccaggcgcaccagctttgaggtatgttcgatacttccctcaaaaaaacattccacatggctgcctgtttccggatttcctccaacacaggcctgcaccgtcttataatctgcgatcttatgaagattcatgcttcccataactcctgtggggtgggcgcggccattgcagggaagatccacaaggggaagtccgagaactgctgcctgaagccatccgtttaccgttgcttctccgccctgttcattggtaatgatcccggcaacaggaaaatcacagtttctctgaagaagaacaaaggtctttaccagatctgccggagtcataaactgattctccgcatttggagcgcccaccagggaggcggtcagtaccatgtcgttatcgtcaagatcctcagcacttaaaagtctgagatctgcatactctaccgcaagctttgcgtatttgcggcctttttttgcatcgcctccgccgccccctcccaggatggttcctccgtaaagggcagcgtcaagaatctcttctgtcagtttgattccttttgtttccataaatcaaccttctttctagtgtgagcttatgttactttttctttccaagagaaagcgttgctgtgaagaaactgtacagcgcggctcctgccagagaacctgcgcccagaatattcagtgtctgttcgttttctttgttgcgttttacaagaacataacgtaatacaagggcgatcaggattgtcaaaccgttaatagtggagcctaccagaagacctgtggcaaaaaggatgccaacctgtctggaaccacccagaagctggatgatcgcgccgggaatcgcccagatcacaagccatttggcaacacctgcgcctgcaccggcttcaatggttgcggcaaaggtagcgtctaccggagcaaacagtccctggtcaaaatatttgcctgccataatggcaaccagaacaaaggcaaccacaaatccgatcatttcagagtaatactgctgctttcttccttccagctctaactcctgatcctgaccgcagccgcggagaatatatccacatttcaggtcataggccatatcagaaaatgccgggccggtagcagaggtataagctacaaggattccaagaggaattgccgggaagccgattagcataccaacgatcaaaaagatcaaagctgtggcaaatcccgggaaccatccggaatacatggcggaaataccaacgatcagctcagaagcaatggctgcaaatgcagaaaatataacccagataatcagctggaacatactcatatctgaccagattcctgtaattactgcaagaagcactgccacgatcaggtacgccacatagccgccgccgagagcttttttcatatttgccatactggaagaaaacttaccggcagcgctgtttccgtcactttttttcaaaagcatacgtccgcactggatcagggaaataagaccagcgccgatcataattccatgaggcatgtactggaacatgggctgagccatcagatcagcgccttctccgaaaagatctgtaataaccggaaggcttgttccaaaaatatcaatgataaatccgtttgtcttaataatgccaattacaatacttcccacgccaagagctgccatggctgcaaaatcaccaaaccaggaaacacccagaaggtctgttggaataccgatcatcttaccgccaataccgattcccataccagccagaagtaaaagagcttttttgcccttctgtacaactgcaagaatggattctgcggaagctacgcccggaggccatgccccttctgccggaaacatttcgctgtcaaaggttttataaagaattgtggcatcaataatggttgccagaaaagctccgatcagcatcggatacatcagatccattcttcccataataaccggtacaccgatgggaagaaggaagcagttggccgctgaaaacgtagctcctgaaatggatgtctggatcagattctgacagtggatactctgatattttttaagtatcgcaatgggaattcgcgatatgataatcgcaaacaatgctcctacgatcgaggtgttgggcgccactccggtacgcacgatcagttccagaccaatgatcgcaccaagcacactcataacaatattcaggatcagaatatggggagcatatgctttcggatgttttgatgcatggatatgaagctgtgtgtagtctttgtttgggttgttactcatcttgtctcctccttttagtaaaaaaatagccgatgcaggaccgcccacatcggcttcacgcttcttgtgttaagatgatatcactttaaatcaataaaatcatcgtttccgaagcaccatttttctattatagattgtgcataatgcacacttatttcgtaaaaataaaatatttattatgtgatttattattccttttgtttcttttttaaattttattgttttattgcatatatcgtcttactttgcaggcaaattccagttcctgcagttcttccatatcgtccagatctgtatttaaaatctcctgtattttctggatacggtgggccatggtgtttctgtgaaggtaaagagcttctgctgcaagcttcctggaaccatgcttttgagtaagaacatcaagagtttccagaagagcgctttcatgagctctgtcatattctgccagcggccccagttttctctgaacaaactgccccgtttcctcctgctgcgcaatatgaagcaggatcctgtcatactggagatccttcagaaaaacaactgtctgcttctgttttttcatctttcggatccggaacccttcagtaatctcctgatatatctccggaagcatcagatatcctgtgatctcctggcttatcagcgcaaagcaggcgcagttattgactgtttctgttttttcagtcagttccagagaaatctttttcagcatttcttcagaacagctgcctcctataatacaaaaacaggattttttacggcatacacaggtcccctgtatgtaatatttttccagaacgcgaagagattctttgatctgtatctcccgtttcatttccagaaggggcgaataatccccgttctcttcaagctgaagagtaatcactcttgccggaaccgggggccaatgaagggcaaaggtacgatgttccacttcctcttcctgagtgatcttgcctgtcagaagctccagaaaaagcttctgatcctgttccagcttattctgctgtcccatccggtatcgggcatccatatgaatctgattttttgcctccacaacagccaccattaccggaaagacaatatcctgaaaccccgcattgttattcaggaaaaaaagaggcagcgccagctgatcagccagttgaagcgcttccgtcggaaaatcatcaaaaaatcttgttttgatcgccagtgcagaacagtttgcctcatgcatgttttggatcagctccagaagcgcctccttatcgttgcggatggcatagcctgttgtaattaaaagaacatgctcccgcagccattccttcatctttggctgttccatcatgtcataggattccactttgcgcatgagcccgtttttccctgctacaagcgaggcgcctccgctgctccatattttttcaatatcttttacatataactccatctaaaagccttcctctttcataactctgttttttttatgaataactaaaagtatcaaaggttccttgtgaaatctgttcgagacatgtcattataactaaacgatgtccttcagcatctatctggcaacggatgcaattctgactgcggaagccatgcctccgtcaccatatgatggattcttaataaaactggctgacaactggctcagctcctgatgatggtttattgaatgaataatttcattttcccacccaagtaacctggagttagaaatagtttcaatatccagtaatacgtctgttatgttatttctataactgcaattatgtttttctatgatataccgcataagttcccgtcgcttgtccatactttttatatttgcagaagcaggggcagtccgatagttgatcagtggtttttcaacaattccaatacaagcctccggcgtcgtttccagcatgcttaaaaagaaatcccagtcctcaaaccctgagcgcatagattcatcataaccgccgcactgctcataaaattttttacgaagaatatgggttgccggacagcaattatgagataaaaaaggaactatcgttccgccggaaggacagacaactgcatctaaaactccaaaagtacgcatccaggatgacgcaataaccatgtcaggactcttgctaagcagttcgctgacattttcaatatatccggcttcaagcttatcatcaccgtcaaggatcaaaaccattgaggactgtgttttatttattccggtatttctggctgcggataccccctgattttcctgaaaatatacagttattggaaccggtaaattaacatcatttttaatactgtttaatatatcaagagaatattgatctgtggatccgtcatctacaacgataatcctttcaggcagtaatgtctgattacagattgattgaactgcttccaaaatcatattaccctgattatagctggttatcacagcttccagatctgtttttatgtaagttttgccgttatttctatacaacatttcactcctgtttctttatttcatatacttctccgttattagaaagcgcactccatatatactctttttctatgttctcactcgtaagcttaatatatttcattatgtaaagcctccgccaccttctgatttttatatttttcagctcagaaaactggaattttgttatttagatttatccttgaaaaaaccaattaaaattaaaacagtcccgaaaattgctactggaatataaattacattaggtatatgataaacaaatctatcaattccagtcataacaatataaattataatccccacacagattaaaatgcttttatctttcactcttgttctcctttacaattgaaatttattgtatcttcgtaatactttcttcatggaaaaatgcagaaaatcttttactcccgtttccgtccgctccgtttcttcttccggtgatctggcggaggggagaaggtctgaatgtagtcctgccggatcagtgctgcatcctgtgaaaggaaagcagctacacgctcctgatcggaagtttgctccgggaagaaggatgcaaatttctgtgccagctgttcctcttttccatatagtttaagagctccttcatatcctgtcaattctcttagcacagcagtgaattcttcatatcttttttctcttatctccaaatcaactgtcgcctttgcagttgtaccattcagataaagaattttcagcagagtatcgttcttggaccgatccactgttacccacagagccagcttttttgagattaatttcccgcctatcagcatccagttctggcttcggtagatttccagatactttttcatagcatcatcttcaaattctattgactcaaaatgttctccatccagcaactgctccaactgctttttgctgagaatctgattcagcaccggaatgcttcggtaaggtgtacatacatagcgtctcattttctgaaacagagccacaaccagaactgctatgccaagtaaaaacaggaaaagctctccatccatttcaattttcccggttgcagttacccaaaagccccgcagaaccagcacaacgccaaacccccacagtccaagaattagtaactttttcagcggataaaaatgaatccattcgatgatctgcgcctgttgtctgccgctcataggtttatcacacaaaagccggcgggtgatccactgatttaaaaattgtggaatccatgcaattccaaacagaaaagctgaaataccggcataaatggaaatcccgatccatccaatatccagataagactccagaagcagagggaaacttagcagcagcataaggagaaaaaatggagcagatgacttccggtgttccttttggatctttagatcgtttatggcagaatagatgcacaggaaagcgatcatgactgctgacatcgctcctgacacccagtttttaagatctccgaaccgcaggacgtgttccttcctgtgcataccataaaattttccagtaatacccgcatagaggcaaaatcccaggtaggctagagccaaaagcgcccctgtcagtttcaaaattgtttttcctgaaagttttcttttctccatctttgtccttttcctataaaatcactattgcctgtgccaatttattcttctgtttcccaggtaaagctggctgcctgttcgtggtttctgatgccctgattcctcttgctttataatactggtttatgcatccggtactcaaaagcattagtccgttttcagattttggtccagaatcaccagttcgccattacgttcaatgatgccaggctgaaccacaacgattttcaggccttcctgtaattccatgtactgtgaagcataaccccagaccttgacctgatcgccttcctcaagccaaatggcagggcttacagtaccatcctcattcaaaatctggttggcaatacagtaaagctggccggttgtatcctctgcgatgtagagagatacatccgaagcgagcggcgtaccggcaatagatttatattcaccgacttcttcgccccaaatagtgccttcactgtaaaatccaacggccatattttcttcgtatccctcgatgattgcattgaaatcctgagcatacggctccatctcggctgttgtcgtatccttgtaagcggcaatcttttcatttgatacctgttcttttatttcctgcggctgataatccttgtattcaaaaatattatccgaagcaagtgtgatcgctgtgtagtcatcacccagcatgactttataaacagcaatctcatcatcaccaacagtacgattgatgtcgatatttcctgcggaattcagttcatatccctctacaccttccaatgccttttgtaaggctgtgtcagacatagcacagttgatcccattaagtgttacaaagaaatcaggatctggtcgattcttatcggcagaatattccagttctaccaccgtcccgcccccagcaggcttacatggctctgtcccgtcatttacgattgctacatccatttcctgaccgtctttggaaagttccccataaatgcgatcgccgggctgcagagaaacctcatctacatcatattcttctgtttccagactccatccggcctgtatcagccgggaagtttccaggggaagcgtatagtgagtaccatccagtatgaactcaggtgttccgtcatttttcagctgagacaaaatggcctcatctgtacaccccttatcactgcccgcagctgcctgaggttttgaaacgtatccggtcagcatgctgcctgccagtacacatcctgtcagtaaagtaatccattgttttttcataagcataagtcctttctgcgataatatccatttgttttatgtataacccaagtcgtattctgtataactggcgattatgctcctatcagcaatccggccacaaaaagtatgatcagaaagacaataagacacatcccacagaaaactgcaatcgtagtttttactttgtgccgctcctttaatgtcaggaccatcatggcaaatacatcaaaggaaaaaaagaactgacagattccacccaaaaccgcaagccatttcggatgtacgccgtctttacacgactttatcagataagcgatcgcatagggagatgcccccaacagaatcccgtatcctaaaatcaaaaacacaatggttaccagtccaaacaatgccatcagcggcaatgggaagaatgctatcagcgttacatatactgtgatgctccctccgatcaggtagaacgggatcagtccatacttgatgatcaaagtgcagttcagcaatgtctttcttgaccactttcttcctacgatcagcacaacgatcaaattgacgatccctatgataaagggcagaaggatcgatactatctgcaatgtgatcgcattgccaaaacagactgccaaaagaaagaatgtataagacacaattacataaagtaccgggaggatataagtcatttaacagcctcctttcttcgccggatcaggctgataattattcattcttccccatcaccatagtctcctgtattctgtccgtcacatgctccagcagataaaagatcgtctcgtaatggatgtactgcaggatattttcgtcaaacataaatttcaggtttgcgggaaattcctcgtctccctcccagaactgaaggatcacaggcaaaaaagaaaacgggtgcagctttaccgccacatcgcccttcaaatctgttttttcaccaaaaaatccacaggccttttccagggcttctgcctttccgttaaagctgtcagcggttttctgaaatagattcacgcccggaggattcgcctgcacaatgcccttcagcatactgatggaacagaattttccggacaggctgcagttatcttttgaatagcaaagcacatcatagattgtcatggactcattgaaatttccttcggtgactgagcgaaacccgtcctcagaccattccaccacaccgtttttgcggttgattctgtagggtcttcccataaaatccaggtacagatactgtctgtcatttttcagtgaaaatttctgaatcattttttcctggtcatattttataaattcatcccgcatcctgttccgtgtgatctcataattggatactttcatttttccctctttcttaatctgcagcttccaaatcagctgattcggttatagctgtcatatttttatatttccggtaagttttataaaaagtctgtcaaaaatctcacagcctgatatttcatagacttcattgattatttttgattttatcatacatttacagaaaaagacagagtattcttacggcctgaagccaaataaatactctgtcttaaaaaatgatagaatctatatttttattcctgaaatcttctctgttctctttcgtagctgattatcagcaggtctttgcgttcaggctgtatactgtcctgcaagcacagtcctgcgcacttttttcctgacaaagaaaaagcatactgcctgaagcacaatggtaaccgtccaggatgcaggataggaaataaaaagaaaatcaagggatctgtgagccggaaataccaggtagatccagatgatcctcattccaaccgttccgatcacggaaagaatcatgggtacagcagaatagcccattccgcgcagcgctcccggaaaaagatccataatcccacagagaaaataaggaactgtggtaaaggcaaggatctccagtccgcaggctatcacatctgcctcgctggtgtaaatcctgagaaggccggaaccaaagaaccaggctccaaaacccaggctaaaggaaactcctacagtaagaatcatgcagtttacaagaaccttgtccattcgtttcagtttacccactccataattctgactggtaaagctcatacatgcctgagtaacagaattggctgcagcataaaggaagccaaaaatattgttggcagccgtatatcctgccatggcaacggagccaaaggaatttacagaggactgcagcattgcattggaaaaattaataaccgtgctctgaagtcctgccggaatacctacctgaaagatctgcttcaggtacttccacttaatagtaagtctggaaaaacggagctgatagctgctctctgatttatacaggcatcgcaaaaccagaatacaggaaatcatctgagcgataatggttgcaatggcaactcccgctacatccagacggaaccggatcaccagaatcaggttcagaaccgcattggtgattcctgaaatgatcagaaacaaaagcggtcttttagtatctcccacagatcttaaaatagctgccccgtaattgtacagcataaaaaaaggcattccgataaaataaatccgcatataaagggctgactggtcaattacatctgccggagtacccataagctccagggcgaatctggaaaagaccagtcccacaaatgccatcacaacgccgctgatcagagcaaacataatagaagtatgtacggtctcggacatttcctttgcttttccggaagcataaaaacgggcgcttagcacatttgctcccagagaaacacctataaacagattggtaaaaatattaatcagcgctgtagttgatcctacggctgccagagaacggctgccgctgaatcttcccaccaccacaatatccactgcattaaacatcagctgcaaaatgccggacaacatcagcggaatcgaaaatgaaataagcttgggcataatcgagccattgcacatatcaatttcgtatttgctgtttttcaattttctctcctcttttccctgtttaaaataaaatattttttatattcccgtagtttcgggaagtatttttcagtcagccagacttcccagataataaaagcctttacactcctcaagctttacatttacataagtgcccagaagactttcatctgccggaaaatgtaccagaagattgtactgggtccttccggtaaaaattcccttctccttgctttcctcttctaccagaacctcctgaacggttcctgcaaaccgggaggaacggattcttccctgctcctgtacaagggcaagaagacggttaaaacgctcctttgtcacatctgccggaacctgatcctctttggcggctgccggagttccggtgcgtttggaataaataaaggtaaaggcagtatcgtatccggctttttttaccacatccagagtctcctggaaatcttcctctgtctctcccgggaagcctacaataatatctgttgtaagagaaatatccgggatggcagtacggattttttctaccaggttcagatatttctctttgtcatagcgacggttcatctccttcagaacacggctgctgccggactgaagaggaaggtggagatgatggcagatttttttgctttttgccattacctcaatcagctcatcagaaaggtccttcggatgagaagtcataaaacggatgcgcttcagtccttccacttcttcaagcatggtaagaagctgggcaaaggtcactggattttccagagtttttccataggaatttacattctgtcccagaagcattacttcggaaactccgtctgccacaagacgttccacttcctttacaatggcttccggtttccggcttctctctcttcctctaacataaggcacaatacagtagctgcagaagttattgcagccaaacatgatatttacaccggatttgaacgtatagttgcgctctgtgggaagatcctccacgatctgatccgttccctcccagatatccacgatctgcatgtcagataacagcatatcgtaaaaaagctctgcaaacttaaaaatattgtgggttccaaacaccagatttacaaaagaataggtttttttgattttttctactacctgaggctcctgcatcatgcatccaaaaagaactatcttcatatccggattctgatccttcagactgtgaagatggcccagacgtccgtacaccttcagattggcattttcgcggacggtacaggtattgtaaattacaacatctgcctcctcactgtcctgacggacatatccgatttcgtccatgattccggctacagcctcagactgtttttcattcatctgacagccaaaggtagtaagacaataggtcagaggacgcccgatggtctgcattttctgctgtgtcaaagctctggccagctcaataaaggaacgctggcgttctgtttcattctgtatctcttttgtttctgtgtcttttatcataaatatatctgctccttgtttctttttttatttttctatgatacaagaattttataattctgtcaaaatttttccggatgcagtgaataaacaacagcaacgagccaaaattcatttcagatttcctgcggcaatggaattttggcttgtatgtctcggggttttagcatattttgtcaaacttccatgatatacaggaaaaatagcaatcatcgaagataatctggcatgtattctgaccgggctgccgggaacagagtaaacaacaaggccatcgttgcctcaaaaaacacccggcagttctcaggaatcagctcctgaagtctgccgggatcaacattttaagcggttatttaaagttcgcctacagaaaaaatatactccagaggaatcgtgtaaatctgctgataccggttttccagaagagagctttcctcttcacccataccggacggcagctctatccgaaaagacggctgccgggtaagctccgcataatatctttccggtgtcccttctccctgaactgcatgctcttttttctgctgttccagagaaaacttttccatgcaaaatcctgcctgcttctgaaaatgtcttgccagccgatagcttttctggtttaccccaaaagcctgaggctgcctgaaatatacgattcttttatctgcctgtccaaaagaaaaaaatccttttccctgatattcctgcaaaatacgcaccagagcctttgtttcattttcactggcaggctcatgataaatccgcattttcctgtaatagctggttggaaaatttttctgcagattcatgcctcttgcgttacagaaatattctgtgcaggctgtctcctgcatacggagcatctgtcggtaaacgggatttcgtattaccgtgtaacctttttcatagatctcatatccgtcaggattcagaaggggaatgaaacatatcttccacccggaaagaagctgcttcacgtcataaagctcttccagcacccatccgcattcccatgcccgacagtattcctttgccatgcgaagaagacaggacggcatatgccgctccgttccgttcagcccgctgacacaaaaaatcacctggtctccctgtcccacctcgatcatgggaatcatccgttcatcatgactgtttccaattacccggaactgcgcaatcgccctgtatctccgggcagtttcccatagttcataatataaattctcataagcaaaaattgttgtttccatcatctgcctgtccccctgcccttcatactgaatatatatgaaaagagacaggcttttagacctgtctcctttatgggcaaattctgtcagatatgctcagaagttctatcagatatcttcttttttacgttttcttacaagcacatagcctcccgccagcagagagaaagctgccagaacggacatggttccaatcggagattcatctgctgtggatacggctgacttggacgtagaatcggaatccttttctgaagccgcctctgtcgccttaatatctgcaacagagcctccgcttgttccgtcatagttcagaccgtcgtccggatgttccttattataattgtcaatataatctttccattcggcatcagaaatttctgctgaactaaaggaagttttcatgtattcaattacatctgtatctgtccattccgtaccattataagtctgtttctggaaaaagatgtacagaggataggtagccgcctcccggattcctttttcctgagaaccgattctccatgacttgttttttgttccgtttacagacatggaccagtacagcggaatccatctctcatcgccggaaaccggatcagtgtcgttctgtcctgcgcctactacctggaaatcatagaatttccttggatagaactgcagcggattttccagacctgtcaccttactttctgtcacttcatacttacgcggcgcgcgggtggttacagttggtgaaacagtcggagaagccggccggctgctgctgttaagtttcagcactcttaactgggcggagccgttatccggttttgccgcaactacaagccaggaatccttttccggaaccttttctgcctttacggtaaaggttgtatttgcttttgccggagtttttgccttactggaatcatacagttttttgatagtatttgtatcacttcctgcatctacaaaataataataccatttgcagtcctttgttgtagacatttttgcagttactgtattatgatccatccatttcagagatttgctctgataagttaaaaatgacggagaagctgtaggtgtgggacttggtgtcacggtagcagatgcgtttaccttcagcactgcgcttaatccatcctcgcccagcacaacggaataatcctctgtatcataagccagctgctctgccgctgccttaaactcttcggaagtaacatctgtgccatctgcctttttccctgcttttgccacagtttttttatctgccggagctgcggctgtcagagagatggaggaacctgtcagcacatctgtcacaaccactgatgcatcctgatccagataaaggtttgccccggtattctcctttatggcaactgtgccctgtacggcaatatccgtattgctgtaaacagctcccatggctccggtatttccggtaatcgtgccgcctttcagtacaagacttcccccgctattggaaacagcgccgccttttgcagtggtgttatttcctgtcagagtgacacctgctgaaatgccgaaagcgccggaatcgctgacatctgccaggcttccctcggaaggttcttcctcaccttttccgttgcttccgtctacagtaagatcagaaccgtcttttacagaaaactgaagctcgctgccctgtccggcaacggtgaacattgttccgttaaatactgttccgtcttccttctgctctctgcgaatggtgattccctgagaagcagccacaatgctgacctttttgccggaaacagaaatggttcctgacaatgcaaggctgtctgtgatctcgatcacagtggattcctgagcgccgctttctatggtgggagcagcatcgaccgcctcctgaagtgtcttataataggttaccgtttcctgattattttcatctatggtagtaatggaaattcctgttggctcattttccagagtttccggggcttctgaaggaactgcctccggtgttgtctctgtttccggaacctgtgtaggctctgccggtgtctccggaactgtgggtgtttctgtgggttctgcaggagtctcggtaggcgcttccggtgttgtttcaggcgtctgtgtaggctctgcttccggtgttggctctcctccttcttcctgaggaatctcgccggaattctctccctcagttacttcagatgaagctgcagggatatcattttctgctgccagagcagcggaaggaacggttccggcagtcatggctccagccaaaagaattgcaaataactgtttttttctcattatgtcctcctatcttacggacgtatctgcccatttccgtaaataatgtacttggtcgttgtcagagcaagaagtcccataggccctctggcgtgaagcttctgggtactgatgccgatttctgctccatatccgaattcacatccgtctgtaaatctggtggaagcattgacgtaaactgcagcagcgtctacctcatccaggaatttctgtgcatgcatataattgtttgtaataatagcttctgaatgacctgtgttgtaacgattaatatgcgcaatggcttcctctacagaatacactattttaatggacagtatgtaatccagatattccgttccccagtcctcttcatcagccggaactgctccgggcatcagagaaagagcttcctggtctgcgcgcatttccacatgcttttcgcgaagtctttctgccagtacaggaagaagaacttctttcatgctgtcatgaacaagcagggattcgcaggcattgcacacacccaccctctgagtcttggcattcatgataatatctgccgccatttccggatcagccgtttcatctacataaatatggcagtttccggtacctgtctcaataaccggaatggtactctgatttaccactgccctgatcagcccttttccgccccgtgggatcagcacatccacatattcattcattttcataaattccccggcggtttctctggaggtatcctcgatcagctgaatagcatcctctgtaattccctgagcctttaaggtttcgcggatacatttcacaattgcctgattggaatgaatggcatcgcttccgcctttcaggatcacaacgtttcctgttttaaaacaaagcccgaaagcatctgcagttacgttgggacgcgcttcataaataattccgataactccaagaggaactcttttctgtccgatcagaagtccgttgggacgctttttcattccaataacttccccgacaggatcttccagatctacaagctggcgaagtccgtccgccattccttcaattctttctctggtaagaaggagtctgtccaccagtccttccggcatatgatttgcctttccgttttttacatcttcctcattggcctttaaaagagcctctgaattttttaccaggtgatctgccacagcggcaagcacctgattttttttatctgtggaaatggtgcggagagcagcttctgcatcttttgcacgctttccaagctgaacaagcatttctttcatattctgacctccctgaattttagcctcttatgcactgtttttccgttacaacgatctccggtgaaatatctgtaggctctgtagggacctgtgggagaagctgaaattcaaaggctgctgccacacgttttacccggggatgtttttccagatagcggtcataaaatcctccgccatagcctactctgtgattctgtctgtcaaaggcaacgcctggcatgatcatcagggcgtcctcccactgtacgatttctccggacaccggctccgggatcccatagtatcccggctccagctgcgcaaaatctgtcagtttataaaaaatcatatcaagcccctgtacctttggcacagcgatttcttttccgtctgcccaggctttttcaatgagaaagcctgtcattacttcatgattgtaatctgcataaacaaggattctgtccgctgtctgatattccggaagagcagtgatattttttgtgatctctttgctccattcctgtatttctttatcagaacacgcttttctctctgcaaaaatctgttttctaatggctttcttttcttccatatttttcacctaaattcgtaatacttccatcttcttctttaatgctgatattgtcaagctgactccttaaattcatgcggatggtcgcaatatattctttgcggagagcgtctctttccttcttttcttcttctgtaagacccacacttttggctttatgggcaagtgtattgatgcggtcgatttttatgttatccatatttttccctcgtatgatattgtagtagtgtttatagaccatctccagggtctctatgttatatatcaaagcttcggcagaatagctgcctgcatctgttacagcagtttttctatataatcaatgagataaaattcctctttctggtttccaacaaataaggttccgtaattacggccttccataaccttgtgtatcacatggaaatctccgccgttggcgatcaccatatccgctcctgcagccgtggcgatctctgcagccgtaagctttgttgccattccgcctgttcccaccttacttcccgggccttttcccatgcttttcagcttttcatccagcttttctacggtgtcgataaactttgcatccggattggtattcggatcgtctgtaaacagcccgtcaatatctgaaagcaggatcagaaggtctgcgccgatcagagctgcgataactgcggaaagcgtatcgttatcgccaaaggaatccagcgcttccagctcaaagcttgaaatagagtcgttttcattgaccacaggaatggtattcagtgtcagaagctcctcaaaggtatttcgggcatgcatgcggttcagattgttgaccatggtattttttgtcataaggatctgagctgccatctgattatattcggcaaaaagcttctgatagatcatcataagccttgcctgtcccactgcggagcatgcctgttttaccttcagctctctggggcgctcattgagaccaagggcagcagagcccacggcaacggcgcctgaagttacaagtaccacgtcttttccctgattgtgaagatcactgatctcacggacaagcacctccagcttgcgaagatcaagtctgcctgtttctttgtggatcagggaagaagagcctaccttgatcacaacacgttttttatcttttaataattcccggtaattcattgttgtctgtctctccaaatctgttttatctgttgattccaagggctgccagagcctctgactgtttcttttccataacagccgcctcttccggttccatgtgatcatatcccagaagatgaagcatactgtgcgcaaaaaggaagctgaactctctttctgtactgtgtccgtattcctcagcctgagcatataccctgtccacagagatcataacatctcccagcagaagctcgtctgtatccaggtcaaagtattcatcctgatcctcaataatggaatagtctgcaggagacggaaacgggatcataggaaatgaaagtacgtctgtgggcgcattgatatttctgaactgggcatttacctccttgatctcctcgttatccgtgatcacaagattcacgctggcctcataggggcactgctcggtttccagaatcttatgtgccacgcggttggcaagctgcgtataatcaatgtccagttttttttctgtttcataatctatctgaatcgtcatgattttttctcctgactgcggcgggctgtacggggcttcgccggcttctgttttttctcatattcgtcgtatgcctgtacaatctgctgaacaagagggtggcgcacaacatccttgctggtaagctggcagaagccgatatcctctatttttttcagcaccttcatggcaacatccagaccggaaaccgcatctctgggaagatccttctgagaagcatctccggtgataataacctttgagccaaaaccgatacgggtcagaaacattttcatctgtgcaggcgtggtattctgcgcctcgtcaagaataataaaggcattgtcaagggtacgtcctctcatataggccagaggtgcaacctctatcagtcctctctccatattttttgcaaagctgtctgctcccatgatctggtaaagagcatcataaagaggacgaagatatggatctaccttgctctgaagatctccgggcagaaatcccagtttttcccctgcctcaatagcaggacgggtcagaatgatgcggcttacctcttcgtttctgaaagcagtgactgccattgccattgcaagataggtttttcctgtacccgcaggtcctactccgaaaacaatcatttttttacggatctgctccacatattccttctgtcccaaagttttgggtttaatgggacgtccctgtatggtattgcagataaaatctttatcgatttctgtaagaacctcatttcgctgctccatggcaagagccagggcatagctgacgttctgttttgtgatggtatttcctctctgcgccagaactgccagttcgccgatcagttttttcgcctgggaagcgcttccctcagttccaagtattttcagaatgccgtctcttgatatcagagtgacattcaatgttctttcgatcagtttcagatgttcgtcgaactgcccgaatacattcccttccagatcagccggaatttccagatgcagctcgataatactgttagccattctctgttgtcctttcttttggttgctccagtatttccaccggagttttctttccgattttttcaatgatctccagatttcctctgctgatacaggttctgtgatccacatctattttaacattatttgcagatatttgaacccccttttccattaatttttcttcataatcctgaagaatacaaaaagcctctgtctttgcctccttttctgtacgtattatctttttcttctggtatcggttcatagtaatacggcctgtggaaacaggaagcctaaaattctcagtgagcttcatcggaagctcttctgtcagagtatgccagccctttttatgctctgctccccattccaagtatagcttcccaatctttaaaaagcctccagtttcctgaatattttcccgtatttctgcttcatactccaatggaagctcagcataataggacagcttcctttttatgtaaatatctgcatctgcatggacatattcatagcgcgtcacttcctgactgtcattttttaattcaagacagccggaaaccagaacgtctcctgttttacagttttcccctggtctgatccggggaactccggccctagtaatgatctttaccacggttccggattctgtggctgtcagattgcagggttctactttttcttttttctttttattctgaaaatccccttcttttactgtaataaccagtcgtgttccttctgttcttgcggaaacccaggctgtctgaggatattcttcccggatggaagctgcaatggcgctgcagtttaaagatttttttttcataccatgggaaacaccctgatcctccagaaacttcaggatttccggtgtgctgttcgccctgtttccttcaatatggatattccagatacgtccggaaagcataagaagaagcattccgcacaaaaaaaatcccagaaaaaaagcttttctttttacgcctttttccacccagaaaggaagcccctgtttttccagaatatgaattctcacctttgtttttctccgtattggtcccagcagaaaaaaatggttgacggaaaaaatacaggtaaagctcttatccttattttgtctcagattccggacgacaattcctcttgccatgcagagattaaaaaaacgttctgtctgtccgccacagataagaacttccacatatccgttcagaaaacaaaggattttttccatagcttcctcctaccgttccggaatgatccgggagatttttcctgtaactgtcatctcttccatggtataccagggaatttccagattttttcccatgattgtcagttttcccgaaaaagtgcttacaatgatttcctcctctgtcagcttcagaatactgcggtaattttcaataacagcctggctgcatcctgtcagtgtaacaacagtctctctgcaggcaagatctctgggaacctcaagagcagtcagacagccttccctgagctgttttcttttttgctgaaaaaacaaagcatcgacctcctctgattcccgcccacataaaaacagaaaaaccttcggcttttatcgtaatttatgccgaaggctttatctttattcctgacggaacaataccatggaaaaccataatattgtattgccgcccagattgtattccatttgctgttcttctacaatttccgcagccactactccatggctttccagacagggatgcattttttccggatgcctgcagggttttccctgggggaatgtacactcctgacagatatcacaggattctgtggacagggtaaaaacggaaaacccctgttcccggagaaatgaggcgatttcttctgtgattttttcgtgctggtgtctggtggaaagcatttcctccatattcataagatccgacacttccgccacactggaaaaaaacactgcctggggatatctgctgatcctgtcccggcactgctccagtgatcctacagccggagggcaggcccaggtagtgccaaaacgttcacattcctgactgcagatcgtgcggaccctttcccttacctgaattccctttgtgtcaagaatacggtactcatacaccggaaactgagaaatatattcctcaaattttcccatatccaactgttttatcataagcttatccttccttctgtactgcctgtatcataatccgatcaaacaaaccgcccattgtcaaaaaccggtagaattgcggtaaccctggtatagcagaaagttagtattcgttatactaattcaaaatgatcagcgccataaatacaaggttttcttcaccggcatttgtcagcgcatggcctttgccgtccggagtaaaggtcatgtctcctgcttctaccatacgaagttctccgttatcgctgtaaattccttttccggaaagaatgtaataggtttcgctttctccgtgatgttcatgatatcccagggaacagcccggttccagagtcacctctgcataaagaccacattttccatttaattgtttttcattaaggatcggcttaagaaaaacatgcccgtttcctccgcacatgttttcaatacgctgaatttccataaaagaatcctccctggcaaaaacttttttatttatgataaggttcattgttcagaatacggaatcctctgtatatctgttccagaagtatcatctgcatcagctgatgaggaaatgtcattctggaaaagctcagccggaaatctgctctttttagtacctgttcacttagtccaagagagcctccgatcacaaaagcaaccgagctttttccttcaattcccaattgaccgattttttcagaaagttctacagagtccagcatttttccgtcaagggcaagagcgatcacgtaatcctggtcccggatatttttcatgatgcgctcgccttctgtttttttgatctgttcgtttaaagcctcagaagccttgtccggagtcttttcatcagccacctgacagaaggtaagcttacagtatctgctcagacgttttgcatattcctgtatccctgcggtaagatatttttctttgatcttgcccacagataaaatccggatctccattatacttcatagtcaagacagatacggttgcaggtaactgtcctgataaaagaaaccattttctgatgttccgggtgaacctgataactgtcaagagcctcctgggattccagttcacagaaaagtccgatttcatgtgtgctggcaggaagagcatctgtgactaccttaacagatatcagccccgggacgattcccgtcagacgttccagcccttctttgatccgtactgccgcttcttttttctgtttgtcatctaaagtttcctgaaatgaccacattacaatgtgctttaccatgtttttctcctttctttcctttacaggctttcttcaataaaattctggaattcctccatggacatcagaaccttccggggctttgtgccttcctccggtcctacaactccggcatcacaaagctgatccatgattctggcagctctgttaaatccgattttaaacatacgctgaagcattccaatggaagctttttccttatcaataataaacttgccggcttcctcaaaatatacatccctttcctctgctccggatcctcctccggacagactggcagtatttacctgctgttcaatctgcggattgtactgtgccgcgggatttttatctgcaagaaagtccacgatgctgctgacttcttcgtctgaaacaaaagcgccctgcagtctggcaggcttctgatatccctgaggataaaaaagcatatctccttttccaagaagcttttctgcgccgttcatatccagaattgttctggaatccacgcctgaggaaacagaaaaagcaattctggagggcatatttgccttaataagacctgtgataacatttacagacggccgctgtgtggctatgatcagatggattcccgcagcccgggcaagctgagccagacggcagatcgcatcctccacttctcccggagccaccatcatcagatccgcaagttcatccacgataataatgatctgaggcatacgctccggtggggtttctccctcggggatcctcattccatctacttttttattgtactcctgaagatttcgcacattaaattccgcaaaagtgttgtagcggttcatcatctctgttactgcccagttcagtgcgcctgccgcctttttggggtcagtgactaccgggatcagaagatgagggattccgttgtacacgcttaactcaaccaccttgggatcgatcatgatcagcttgacctcttccggttttgctttgtaaagtatactcacgatcagagtattgatacatacagacttaccggagcctgtcgctcctgcgatcagaaggtgcggcattttggcaatatctgtaacaacaggctttccggcaatatccttgcctacggcaaaggaaagctttgattttgctccctgaaactcctgagactgcaaaatctcccggagcataactgcctgattttctttattgggaacctcgattcccacagctgcctttccgggaatcggcgcctcaatacggatatccggagttgccaggttcagcttgatatcatcagcaagacctacgattctgctgaccttcactcccatttccggctgaagctcatatctggttactgtgggaccgcagcttgcgtttgtcacagtaacatttacaccaaaattatgcagagtatcctgaagcttctgggcagtctggcgaagatgggcatcggaatcgcctttgccctttccgtttcctcttttcagaagcttcagaggaggataatgatattctttttttacttctgcatccttactggtaatctccttctggatatttcggattccattttctatttctgttttggacgattttggattcttataaggctgagagacttccgatgctgcggactgaacagatgcttctgtattttgctgttcctctttcctgaaatcctcaaaagaatctgaaatttctttactctcgtcctcataagcctggatttcatcaaaatccaaagaatctgaaggcgagtgttccatctctatattaatatcagtgtggtcatcagcagcctcactggaagaatctgcccgatgtatactgaattccagctgtccctgaccggctgctgaagtccggacttcaaaatcctcctcagcggcctgagcagcagtctctgatgtttcttttgtttttttcttttttggaggagtcagttttgttccttccagaaagccgtgagaagaagcctctttctgttcctgtctggcattaagggccgcagccgcctcactgttttcctgttccagagcctgggcagcctgtttttctgcctctaacgtttcctccagcctgcgtattctttctgcctgacggttttccctcttctgtctgcgttcctgatcccggatctcttttttcagatcccgctccggctgcccttccatatagcgttcatgtccgccctttacaaggcttacaatgctgtcccagattttaaaaataaaatcaaaaaaggatctctgagtaatcaggatcattgtaataagaagcacaagtacaatgataatatatccgcctacaattccaaaagcagacgtagaggacatgcagatcgcgcctccgatcacaccgcctcccgtatgaagctctgaactgcgtttataataatccataaatcccgtacccggaagatatccctctgttaaaagctgtacaaagccacacagaaaaagaaaaaacacaagggctgccagtgtttttttgtacgcgagaggattttttctgttggacatcaaaaaggcagcacccacaaaaagcagtacgggaaatacataagccagaagtcccataatcccaaagcagaccgcgctgatctggtcgcctacagcgccgcccagtccaaaattactgataaccaggatcatagaagcagccagaatgatcagcagaatgatttctgtctggaatccacttgtaacattgtgctttttagcagtggtttttcttcttgatgcggtactctttgctgtttttcctgtggttcctcttttgcctttctggttctttgatgctgccatatccaggcttccctcctactacttctattgcttttattactaccggtatcagaacccgttataagttctgatacccttttgtttttttataacacataattaccgataagagcagcaaagcccacaataaaacagtaatatgcaaaataacggaatctgcccctgttcacaagtctgagcagtacacggatggtaaaataccccacaactgcagagatgagcattcccagtacaaaggtaaatcccaggccaacggtcattgcaggcgcgctaaactgtcccagctccacagccagggctccgataatagccggcactgacagaatataagaatatttcactgcaaaactctgtgtaaatccactcatcagacctgcgctgatcgtcagtccgcttctggaaagtccgggaaatacagacagtccctgacaaataccaatccacatggcatttccgaatccggcgtctcttgcagctttttttccgcccattctgccaagatccaccacaagaagaacgattcctgtgatcaggattcccgctcccggcagcagctgtgaagaagccgcaagcacaacaagccttctggctgtgtaacccagaagtgcagtcggtatcatagaaacaagaagcaggagcgcaaatttcttataagtactgcttacgatttttgcatatcgaagtctgtctcctgttcttttattatggatataaagagacagatttccgattgtatccatcagcatgtccagagactccagcagaagtcttgaaatatccttccagaaagtaagtatcactgctgccagcgtaccaaaatgaagcattgcttccagaagaacacccgtttcgtgctccatccccagaatgttctgaagaatgcacagatgtccaaaactgcttacaggaagaaactccagtattccctgcacaactgcaagcaggatcacatataaaactgtcatatttttaaccttttctttcgtctgttttcttcaaatggcatgaaagctgccgttttattccatgtaaaagccaaaaattcaaagtgttttcccggcttttgctgtatcagtatatcacagttctgaaaaagttacaagatatccccggcaaaaaatcgaacatgtgagcgaatacagttgctgctgccggacgcatccccgcggaacttttttatttccctgaaaaatccgtacagactgtactatattcccggtaaacaaaaaaaggaaaactgccacagcatacagccgtgacagttccccgaatcatctcagcctgaacattgcgtttccgcttttatacaggctattattattttaaaatcagtttgtgtgaggcagtctctcatcgatcatgttcatcagatgatctgtggagcgaagcggtgctacaaatgcagcatcttccacagctgcaagttttgcattttcacatgcaagaactccgccataaatctcgcccatttctgcataacggtaaaccggaagcttatcgttcatctcatcagaaatatcctctacatcatcaaacggcatttcaacctcatatacatgagccagctctgcagcaacctcccagttggagaataccacatcttcctcaatggcctgttcaacaacctgaagtctgcgctcagtattggtgaaagtaccataggtagacgcaaatcctgttcccgggatcacaacgtctgcaagtttggcagcctctgtcatgtgagtatcgcataccatcaggaatacaagctctttcagaagctccggagccggatcctcaccgaataccagaagggcttttacaccttccatagcctctgcccctgcagtgattccaagatcaacaagaccctggctgttgttctttgctttcagcataaggataccgtcgcgggcttttccgatatgaccggaaacaactgcgatgtcaccaagaagcgcagcagcctcagtagttactacgttctgctggaatacgatcattgctttctttgcatttgcataaagctcagcgatctcttttgcttcttcagatacagcaacaccttctacagatgccttgaatgtatcaaagccttctgcacctgtgcccttgcccatatcaagaagagcctttgcaacacccttgaagaaaccaaggctgttgtctgtctcaacagttttataagcaaagctcatatgatcctgtgcatatccttccggatttacaaggataacctttgctccgttctttgctgcctgtttcagtttcagacggatcacctgattttcttttgcaataaagcctgcgcacaggatcacatctgcagaaagaacctcgttgatggtgttcggagaagcgtttacgcccagaaccttttcaagaccgttctctctgttgttgaagcaaagagtcttagctccgatagaatctgcgaacttcttgatcacatatgcttcttcgtttgtatatctgtcagaaactgctacagcaactgcgtttcttccgtattttgcggcaagagattctgctttctttgcagtcagcataaatgcttcatgataatcaacctctgtaagctctccgtcctttcttgccattggctcaagaagtttgccgtccataacagaacagtcaaagccgaactttcctcttccgcagagaagtcctttattgacagcgccttctctgtccggaacagcttttaccagcatgtctccataggtttcaagatgcatggagcaacctactgaacagtaagcgcaggtagtatcggtagcctcagtgtcaagcggaacagatttttcaagagtaagattttcctgaagagcgcctgtagggcagacacttacacactggccgcaggaaatacatcctgtctcagaaagcggctgttcaagagccggcataacaactgtgtcaaatccacgtttcacaaggccaagagcgcctactcccataacctcatcgcaggcacgaacacagagtccgcagaggatacatttattcggatcccttaaaatgaacggatgctcatcgtggaattccacttcattgatgtctcctgccagacggtccggatccacatcgtacatatttgcataggagatcagcttacactcaaagtaatctttacatccgcactccagacaacgatgagcttcctcaacagcctgctcctcgtcgtatccgaagactacctctgtaaagttgtcttttctttcttctgcattcagctgctccatagtcggacggcacattctctcacggtcttcaaaagtagccggtgttacgtcctttttggttacataatagtttggctcgtatttgatctcttctccgcgaagataagcatctacgatcagatagctcttcttggcatcgccaatggattcaactgcgatggaaatcttgtcattaccgcagtcaccgcctgcgaatacgcccggaagtgctgtcatgtatgtatctttatcataaacaaggccgccctttctggtaagctcaaccccgttcattccttctgcatttactctctggccgattgcaaggattacagtgtccacatcaatcgtctctgtttttccttctaccggaaccggagcgcgacgtccggatgcatccggctcaccaagttccataacctgaagaaccatctgacggcagtgtccgttttcatcagaaatgatctcaagaggattggtcaggttcaggaagattactccctcttcctctgcttcctcgatctcgatcatatctgcaggcatctcatcttttgttcttctgtaaatattataaaccttgtcagcgccaagacgtactgctgtacggcaggcatccatagcggtattaccgccgcctacaatggcaacgtttttgccaaggtcaatatcttcattgcggacaacttttctgaggaaatcaataccgccgattacaccctcggcatcctcgcccttgcagcggacaccggtagatacccatgcaccgataccaacgcatacagcatcaaaatctctgcggatcgcttcaaaagagatgtcctcgccgatctttgtatttgtaaccatggttacgcccattttttcaagaacagcgatttcctcatccagaacttctttcggaagacggtattccggaataccatagcggagcataccgccaagctttggcattgcctcgtagatcgtcacatcatgaccaagctgacggaggaaatatgccatggaaagtccgtaaggaccgccgccgatcacagcaacgttctttcctgtgtccggctcgcactccggaacaaacggatcttcaccgaactcgtcagtatctgctgcaaatctcttaaggtttgcaatagcgataggctcgtctaccataccgcggcggcatgctgtctcacacggatgaggacagacacgaccgatagatcccggaagcggaatgttttctctgatcagtttgatggcctcttcatactgtccgtttgcgatcagacctacatagccctgacagtctgtacctgcaggacatgcaagcatacatggcggacggcagtcacccttatggttggaaagaagaagctccaggtttgtttttcttgattcaataacacgcggtgtattggtatggatgatcatatccggtgcgatctcggttgcacaggccttccagagtttcggattgccttccatctctaccatacaaagtccgcatgcgccgtaaatttctgttctctcatcatagcaaagagtaggaatgaaaatatcgttctctttgcagacatcgagaatggtctggccgggaagtccatagacttcttttccgtcgatatttaatctatatttattcacagtctgcacctcctattaaactctctttactgcgccaaatttacaggattcctcacacttgccgcacttgatacatacagcaggatcaatcttatgctgctgttttttctcgccgctgatggcgccaaccgggcagtgtcttgcacaggctgtacagcccttgcagtcctctgtaatctcgtagtgaataagagccttacaggattttgcagtacatttatgattgtaaatatgatcctcatattcattgcggaaatatttcagagtggtgagtaccgggttcggagcagtctgtccaagtccgcacatagcgccgtccttgatctttcctgcaagctcttccagaagctcgatatctccgtcttttccttcgccctttgtgattctctcaagaatctcaagcattctcttggtaccgatacggcagtagttacatttaccacaggattctttcttggtaaagtcaaggaagaaacgtgccatatctaccatacaggtatcctcgtccattacgatcataccgccggaaccaacgatagcgcctgtcttattgatatcttcataagtaacaggagtatcaataagatctgcaggaatacatccgccggaaggaccgcccatctgaacagccttgaattctttgtcgtttttgattccgccgccgatgttgtaaataacttctttcagggtcattcccataggaacctcaacaagaccgcccttcttgatttttcctgcaagagcaaataccttggagcccttggatttttcagcacctctgtcagcaaaggcctgtccgccattggcaatgatccatgcaacgtttgcataggtttctacgttattgatgttggtcggaagcttccagtatccctttgcagccgggaacggaggtttcagtcttggcatacctctctcaccttcaagagaagcaataagagcagtctcctcaccgcatacaaatgcgcctgcgcctgctttgatacggatatcaaaatcaaagcctgttccaaacagatttttgcccagataacccttttctcttgcctgtgccatggcgatctcaagacgtgcgattgccagtggatactcagcacgacagtaaatgataccctctgtagcgcctgcagcaaaaccgccgatgatcataccttccagcagggagtgaggatcgccttccagaacggaacggtccatgaatgcacccgggtcaccctcgtctgcattacataccatatatttctgcgcgcctttattggatttgatcgcattccatttaaaccatgtagggaaaccggcgccgccgcgtccgcgaagtccggaaaccttgatttcctcaataacttcatccggagtcatggaagtgataactttgcgtgcagcttcatagccgcctaccgctatgtactcatcaattttttccggattgatctgaccgcagttgcggagaacgattctctgctgctgggaaaggaacgcctcatcctctgccggaatcacgtattcctctaccggctttccgccaatcagatgctcctctacgattttttctactttatctgtagtacatttgacatatcttgcttccagagcgccttcgtcattatacacatcaacgataggctccagatagcaggtaccgatacatcctgttttatcaataacaacatttgtaagatttttttctgctacgatacgctggaactcatcagaggtcttcttagctccggtagcaataccacagctgccttgtcctacaacaactttcatatttctacctcctatgcgttctttgctttataatcgtcaagaatcttcttaacagaagattttgtcaggtttccgaatgtttcctcaccgtctgctgattttaccatcataaccggtgcaagagaacagcagccaagacaggctacgttatttaatgtaaacagaccatcttcggttgtctctccgtccttgattccaagatgttcacagacagcttcctcgatcatgtcagaaccatttacatgacaggctgtacctttacagagcatgatcagatactttccgatcggctgtaaacggaactgtgcatagaatgtagccacaccgtaaattttagcaggcatgatccctgttctttctgcgatataattgatcgcatccatagaaagatacccgtagatatcctgggtctgctgaagaatggtgatcaggcttcccggcacctttgcatatttttcaagcaccggagccaactcagcgaaatccgcgtttccgctgttctgacatccacacgtattgctcatatgatttgtccctcctgtagaaattattttaaacatcactacttattctctagcattatatcacaaaaggagggacagtcaaaggaaaaagtgcatgatttttcataaattgttaataatgtgactaactttttcatgaaattacatttttttctcagctttctgaaggtcaattagttcatacagtttggcaagagcctctttcattcctcccacttcatcgatcagtccttcttttacagcctccctgccttccagcatggttcccacatcttttaccagctgtgtggtatccagcattagctcttccaagcgcttctgagaaatgtgggaatgagaagcaataaatcccgtgatccggtcctgaattttttccatattccgataggtctgtgcaacaccgataaacatcccactggaacgcaccggatgaatcaccatggtagcgcttggcacaacaaaggaatagtcggccgatacggccatgggaacaccaatggaatgaccgcctccaagaacaagagaaacggtaggaatacttaaagatgcgatcatctccgcaatggcaagccctgcttccacatcgccgcctaccgtatttaaaagaatcaaaaggccgtccacatcttcatcatcctccaccagagccagctttggaagtacatgctcatatttggtggttttactctgagaaggcgctgactcatggccttccacctcaccgataatcgtaagaagctccacatgatgttttcgtggatttctatccagagtcacctgtcccatttcctttatctgctcattttttctgtcctgattttccagtttttcctgctcatatccagtatcctctggttttgtctctgcgtttttctgtgatttcccattctcatctgctccggaaatcattttttccattggatgctgttcttcttttatattctcctggttcagaaatttttcctctgcgtatccattctcttttccctcatactctgacagaaccttctgatcataattcatttgctgccgttttcctttttcggacatgcaatcctccattccgccgccttttatccggcggcacaaataatataaaaaacaattcacacttccacagtttcatggtacaataaatttagtttttgatgctgcagtattaactgtgatcatctccgcccgtctattcatttacagaaatgcccctctgctcaggcgaactatatttcaccagttcgtttattacctgattctgttttagctttgcaatcccatcttaaatctgcttctttcccggcaacacccctgaaaaaccatcattcatgaaactattatgtgtaaaacatgaatttttattctttgttataaatgatcatattcgaaaaagcacacgaactaatttgtctttgtggaatgcgcatatagagtttagtatttctttttatgtccatatattccgaattttattgtacaaaattcaatattttcttattatatatttctttattgatgccggatcatacatagttcagcgctgccttctgcagggaaatggatgttacctgatatttttatctgtaatgcagtcagaccaatatgtatgtttctgttttcagcttcagcagaacctgaccagttgtatggtaacgcatagtcagaacgtccttatggctatcgaaagtaatttatcatcttttattttttcacttgatttatgtatctgtaccatgataattcaatagactttacactcttaaggtggtataatgaccctactgaatggatgtatgtaaacaggaaggatgatgcaatatgttagaccagaaagacttggagcttcttcaaaatttaatgcaggaagttgtaaaagaatcagaacagaatattcttaacagcgtggataaaaagattgctgcttctgagcagaatgtcatttctaccgtggataaaaagatcgctgcttctgaacggaatgttatttctagcgtagacaagaagatcgctgcttccgaacgtaatgttatttctagcgtagacaagaagatcgctgcttccgaacggaatattctttctgtcatggatgagaaactatcccgatcagaaaatatgattcttaatgagctggacagagtacaggcacatcttgaaggagatttggaaaaagtacagaaaaatctggaagaactgaaacagttttacaaaattgataagttggaaacagataatacttcgctgcttctgaaaatgtacaatgacatgcaaaaagaaattgcagagattaagactaaaatagcataaaacacaatcgccgaaagggtgtaaagcctactgagttatcaggcggtccatttgcatctgtataaatccatatgtccactcacaaaatacagaacactctttaccataaaaacagaccatctaaacaatcagtatagcatcaccgaaagccattttgttataaaaagcatcatcatttttaagataaaacagccctcatctcccttattttaaagggtctgagggctgttctcaattattcatcccagttgtgccatacgtcagtgacgtcatcgtcctcatcaagaagatcaagtgttttctgaaggtttttgatatctttttcgtctgtaagctccacataggtctgaggaaccatagccacctgtgcctccagcataggaactccggcagcttccagagcctctctaactgcactgaaatcatccggtgctgtgatcacttcaaagctttcctcttcctcactgaaatcctcagcacctgcatcaagggcaaccatcatcagctcatctgcatccatctcgcactcttccttgtcaatgatgatctgtcctttctgatcaaacataaaggaaacgcagccctgtgttccgatgcttccgtagccttttgtaaaagcatttcttacattgctggcagtacggtttttattgtctgtaagagtttctacgataatggcaacaccgttgggaccatagccttcgtatgtagcacgctcatagttgtctgccgcctctgcacctgctgcttttttgataccgcgctcaatggtatcatttggcatattatttgcttttgcttttgcaataacatcgcgaagcttgctgttattgttgggatccggtcctccggctttgacagccataacgatctctcgtccgatcacagtaaagattttaccttttttggcgtcgtttttctcctttttatgctttatgtttgcgaattttgaatgtcctgacataactcactttctccttttgtgttcttgtcatttattttttcggcccgcacctttcctattgtcctgtttccaagagacaggatcttaaagcggtaaccgtttgcaacaatctcatggtccagatcttcctctgtgggaatatgccccagaagctctgtgagaagcccgttcagcgtcgttacctcaacctctccaaaactgatccccagctcctcctcaacatcctccagctctgcaaaaccatcaatcagaacgctgttatctgtctgagtccggatagcaatatcctcgtcctcatcatattcatcaaggatctctcccacgatttcctccagaatatcttccattgtgatcacgcctgcagtctggccgtactcatctaccacaactgccatatgtgcctgttttacctgcatagtacggaaaatattgctgatacttcctgtttccggcacaaaatctgcttttcggatcagtcccggaagctctctgagaggtttaaattttgcccaggaattctgggtcataaatttgagagcatctttgtaatggatcagtcctctgatattgtccatgtcatcctcataaaccggatatctggaatttccctcttccagcatctcatctataacgtctttaagaaacctttcctggtcaaaggccaccactccggttctgtgtgtcataatatcaccggccttgatatcattaaaagaaatgatattctgaatcatctctgcttcatttttctctatgacgccctgttcatgagcctcatccacaatagaaatgatctcttcctctgtaacagcttcctgctgttctccaagcgctaccccaaaaacaccggcagtaatacgcgcaagccaggtaactgtcagagtaaaaggccacattatcgttaccactatgctgacaagccgcacataacggaacgcatactgtctggagcggtaatctccgatccttcggagcatcaaaatgccaaaagaggcaagaagaacaacacagagaatcgaaatcagtaccaaagccggaaactgatctatgtaacgatgtgagatccgcgccagaagaggcaccagaaaaacaccgataaagattcctgaagctgttacgatcagaggaatggcattgacatatcttaccggttcatcaataagccttttcagtaatccggcttttttgtttccttcctctgccattttctgtatttcgctctgattcagatttctgactgctgctgcaaagccataaaggattccgttcagcaaaatcagtatcactaaaacaataagccccgccaggggcgatcgactgccgtcgtccattttgtatttcctttcttaactcgctgtacatacagtgtatttccccggaaattacctgtgaatcagcataattactgctaaaatatagcactttccctgccgttcgtcaagaattcccgtccaaaaagtatctttcttaaaagtatcttttgccctgcccaggcagaaaaaggatcagaagctcagttccaggctgatctccagcgcatgattcacacggtcaagcatacactgatccaggtgacacaccttatccttcagccgccgtttatcaatggtccttaactgctccagaaggatcacggaatctttttcgatcccgtaggcagaagcatcaatttcaatatgtgtaggaagcttcgccttattcatttttgatgtgatggctgcgcagatcacagttgggctgtgccggtttcccacatcgttctgtatgatcagaacaggacggatcccgccctgctcgcttcctaccacaggtcttaaatctgcataaaaaatatcccctctttttattaccacacaattcacactccgattctgttttctctactaatcagtatttccagttttttcttgtgtatacatgcgtggtatttccagtttctgccgcctttacctattcaaaaaaggtcagctcaccccatttctttccgttctttatataaattcttggtacccgttttccaatatcacaggcaaattcataagaaaaccttcctgataagtctccaagagtttccagactgagaacctcatctccgtcctttcctgcaagtgtcacctcgtcacctgtgtgaacctcaggaatctctgttacatctaccataaactgatccatacagatccgcccgatcacaggagccttttttccatggatcaggacccatcctttgttggaaagacttctgggatatccgtctgcatagcctacaggtatggtggcaaccttcatgtttttttgtgcagtaaaggttcctccataactgaccgaagcccctgctttcagttccttgacataactgacatggcttttcagctccatagcaggcagaagccttacaatatcccgttccacctcatcagaaggataaattccataaatggtgattccggcacggacggcatccatgtttgcttttggcatacggataatgcctgcgctgttggaacagtgctgtacaggaattctgattccactttcatgaagcagtctctcaaaggtcacgtaacgttccagctgtttttcagcaggagagatatctgtttcgtctgctctggcaaagtgggtgaacagtccctccacctctacattggaaagttctgtgatcttcttaatttcctgaacgctttctgtggtatcagaaaatccaatcctgctcattcctgtgtcaagtccaatatggatatgtactgtttttccctgacggacagcctcctctgacagcttttctgccatggagtattcgctgacagtcagccggatctcctgctccaccatatcaggaaaatattcctcaaatacgattcccagaatcaatattggctttgttaccccaaaggcacgaagctgaagagcctcctctgcggtagccactgcaaatccccagatataactgtatccgtggatcagacgggcaatggcttctgctccgtggccatatccgtccgccttgatcacagcaatgatttttgtgccctttgcgatattttttttcatttctccaaaattatgcgcaatagcatccagggatactactgctttgattctgtcatatctcctcatgtcttcctccgtacttcaatacctccggaattgtcaggagcagatctcccgccttcattccatacattcccttgttctcagctgccagatcgcctgctcttccgtggataaaaactcccagcgctgcgatctctgtcatttcaccaactgaaagcgcctctcctctgtacatacagagcattccggcaagaacccctgcaagtacatctccgcttccggctgttgccattccggcatttccggaaagattataccatactgtgccatcggaaccggtcgttacagtacaggcatccttcagtacacagacagagcccgaagctctggcatattccagtgccgaggcttcccggctgtcctgcagctctccaatgctttttccggtaagccggctcatctctcccatatggggagtcagaatcacatgactgcccagaaggtttttccaggacggattttctgccagaaggttcagaccgtctgcatcaagcaccactttttttccggataaagctttttccagaaaccagtgcaccttaaaccgtgttttttccgaaattccaagtcccggtcccatcaggatcacatcacaccagtcaaaggcattctgataggccgcctctccttttccacaatcaataatggcttccggaagcaggctctgcaaaggaatacggttactttcatcggtaagaatacgtaccattcccgcaccgccggcaaatgctgccgctgcgcagaaataggcggcgccgcacattcccgggcttcctgccactgcaagaacctttccgaaggtggacttgtttccttctggtgttcttccgggaatctttttggtatcttccacttccagaattctctttttctcaaaaacaccagactctccgtaaacgccaatatcggccagaaccgtccttccggcattttttctgcccggataaaggcacagtcccgccttcagaaatccaaaggtcacggtaatatccgcctcaaaagcagcacccatcactgcgccggtatctccgttcaccccggatggaatatcaacagctactttccaggcagtcatccggttcatggtttctatcagttctttatattttcccataacaggacgggccagtcccacaccgaaaacagcgtctactatagtagtatattcacgccactgcgggttattcacaaccggaacatgataatttgatgcaatggaaagctggcgcgcggtttcatgggtaaaagaggaatgatttcctgccacataaatctcagcctgatatccatgaagaaaaaggatccgggcaatggcaattccgtctcctccgttatttccgcttccacagacacagagaatcttctcttctgtgttatttttatgaaacaccttttccatttcttccacagttttcagagcagcccgttccataagaacacaggaaggaatgcctctcttttcaatcgtatacgcatccagctgcttcattctctcacagcttaccacttctttcatctgatcccctcctttttgtatctgtctgctttatatctttttacatcaaaaggctgtcagcccggaatagggtgacagcctgctgagatgggctaattttcatgttcctgacggtactggctaagattgtaagaaagccgcataaggctctcggaaagatgtacattctctacgatcacatcatcaggagtatccagatcaatatgcgcaaaattccagattgccttgattccgttctcaatcagaatatttgccatatctccggccttatttttcggaagcgtaaggattgcgatctcaatctgattttccttcaggaaaaacggaagatcactgatcatctgaatctcaattccccgcactgcgatcccttccagtacaggattgatgtcaaaaatgcccatcagcttaaatccgcgtttttcaaaatccacatagtttgccagcgcctgtccaagattaccggcacccacgatgatcatgggatgaaccgtatctaaccccagaattttgccgatctctgtgtacagatacttcacattatatccgtatccctgctgtccgaatccgccgaaattattcaggtcctgacggatctgagacgctgtcacatgcatttttttgctgaggtcattggaagaaatacgctccacattttcttccagcagttctccaagatatctgtaataacgcggcagcctttttatcactgcttttgaaatttgttttgcctccacgggatgatcctccttctgatttcctattaattataacgaaatgttattttaatgtcaaataaagttttttcacttcgcaaaaactttttggtctttacaaaatcattgtaaaagccttataatcttacagtacgtattaagataattaaggcaatttgcggaggaacaacaatgattttagcatgtcagggcatctgtaaatcctttggcgaaaaagagattttaaaagatgcctcttttcacatagaagagcgggaaaaagtcgctctgatcggtaataacggcgcaggaaaaaccactttgctgcgcattattatggaagagttttctgctgattccggaaacgtgatactggcaaaagataaacgtatgggatatctggctcagtatcaggatatttacggacagcgcaccatttacgaagagcttcttacaaccaaacagcacatccttgatatggaagaacgtatgcgctccattgaactggaaatgaagcatgtacagggcgaagagctggagcagcttatgaacacctataccagacttacccatgaatttgagctggaaaacggctacgcatacaaaagcgagcttaccggcatactgaagggtctgggatttggggaagaagactttgaaaagccgattgaaactctttccggaggccagaaaacaagggtagctcttggcaagcttctgatctccaggccggatatccttcttcttgacgagcctaccaaccatctggacatggaaagtattgcctggctggaaacctatcttctgaattatccgggagctgtttttattgtttcccatgaccgttattttcttgacaaggtagtgactaaggtagtagaaatcgaagccggtcaggtgatttctttccagggcaactactcttcttatgcagaaaaaaaggcgcagctgagagacgctcagtataaggcatacctgaatcagcagcgggaaatcaaacatcaggaagctgtgatcgttaaattaaagtcttttaaccgtgaaaaatcaatccgcagagctgaaagccgtgagaaaatgctggataagatccagagacttgacaagccggtggaaatccagactcatatgcgtctttctctggagccaagaaccgtaagcggaaatgacgttcttactgtagaggaactgtccaaaagcttccccggccagacactgtttacaaatatctcctttcagataaaaagaggtgagcggattgcgctgatcggaaataacgggacaggaaagactaccatgctgaagattcttaacagcatccttcctgcagactccggaagcttttccctgggctccaaggttcagatcggctactatgatcaggagcatcatgtgcttcattcagaaaaaactatttttcaggaaatttcggattcctatcccacactgacggaaacagagatccgaaacatgcttgccgcctttctttttaccggagatgatgtttttaaagaaatttcttctctttcaggtggagaaagaggaagagtctctcttgccaagctgatgctttcagaagccaatttcctgatcctggacgagcccactaaccatctggatattgcttccaaggaaattctggaggaagctttaaacagctacagcggaaccgtcctctatgtttctcatgaccgttattttattaatcagactgctacaaggattcttgacctgacccatcaggcgattgtgaattatattggtgactacgattattatctggagaaaaaagaggagctgacggaaaaatatgcgcctgccccgtctgatcctgctgaaaccagagcaccggaaacagataactctgacagcaagctttcctggcagcagcaaaaggaagaacaggcccgcaggcgaaaactggaaaacgaactgaaaaaaacagaagccagaatcgaagagctggaaaaaagagataaagaaatcgatgaaactctggtgcttccggatgtgtgcaccaatgtggcgcgctgtactgaattaagccgcgaaaaagaggcggttctgaaggaactggaagaattatatgaaaaatgggaatccctcgcctgaggttttcccatttttgctgtccgaaaccgctgttcatatggtccaaaacaattcctgttattttgatttttgtacggttacttcataatacgatccagtgactcccgcacggccagaataaaatctctgctggaaagcacctttggatgcttaatggttgtgatcatggcaagatcctttgtcatctttcctgcctcaatcgtagaaagagttgctttttccagtttatccgcaaactcagtcagagctttatttccatccagctctccccttttcctgagcgcacctgtccatgcaaaaattgttgccactgagttggtagaggtctcttttccttccagatgtctgtaataatgtctctgtacggttccgtgagcagcctcatattcatagtatccgtccggagaaacaagaacagaagtcatcatggcaagagaaccaaaggcagaagaaaccatatcgctcataacgtctccgtcatagtttttgcaggcccagataaagccgccctccgctttcatcacgcgggcaaccacatcgtcaatcaggctgtagaaatatgtcagtcctgccgcatcaaatttcgccttaaattcctctgtaaatatcttctggaaaatttccttgaatttgccgtcataggttttggaaatagtatcctttgccccgaaccacacatcctgatttgtatcaagagcatagttaaagcagcttcttgcaaagctttcgatggacgcttccatattgtgcattcccatggcaactcccggagacttgaattcctgtacaagagaacgtttctcttccccgttctcagaagtatataccagttccacctttccaggtttttctacataaaattctgtgtttttatatatgtcaccgtatgcatgacgggcaatggtaattggttttttccagttacgtacacagggttcgattccttttacaacaatgggagcccggaataccgttccgtcaagaatagcgcggatggttccattagggcttttgtacatttttttcagatcatattccttcattcgggcatgatttggagtaatcgtagcgcattttactgcaacaccgtatttttttgtggcattggcagcatctacggttacctgatcgtctgtttcgttccggcaggcaagcccgagatcataatattccgtattcagatccacatagggaagcagaagttcctctttgatcattttccagagaatacgggtcatctcatctccgtccatttctaccaggggtgttgtcattttaatcttatccatgtattttatctcctctccggttgaagcatgttctgtttagtattgtacaaaaaaactcctcttccgtcaacgctgatgctttcacttcataaaatatttatgattctgcccctctttcgtctacagttccagaaaccgttccaggttaaatctgccccatccctgctggtttctgggaaatcccatatcatctgcactgtccttcagcatcattttaatctccacattggtaagaaggggatctttttcaagcgccagagcaacggcccctgaaacaaagggcgtagacatggaggttccgcttttcatccggtacccgccctttgatgaacaggaaatgatccggtttccgggagctacaagatccggcttacatatacattcaaacgtaggacctcttccggaaactccttccgttcccacaagcatgtcactggaacctacggtaatgatctttctgctgcttcccggcgctgtaatgctccctggcagcggtccctgatttcctgccgctgccacgaccaccagcccccgatcccataatttctccactccctgtatcaggctgttatgttcttttccgtttttacaggtggttcccacagaaatattcacaacacggatatggtatttttgcatatgacggatgatccagtcaaaggcgcacaatacatcttctttgtttccgttcccaaaccggtccagaaccttcagcccgatgatcccgcatccaggagccactcccctgtattttcccccggaggctgttccgtctccacagagaattccggttacatgagttccatgcccattatcatcataaggagtctgtttatgtgaaataaaatcagaaaaagcacagattctgtttccaaaatccggatgcggagaaatgcctgtatccagaattgccacaccgatgccctttccggtataattcatcattttcatgaatatactccaaaaaagaagatttattttaatgtattcagtctgagaattatttgcgaattttatagaatatgaatatttttcatagatttgccaatactgtaaaccatcggaataacttaagtatggatcacagattgcagccgccaggatactgaccgccctgatgaaacccgctgcataaaaaggaggattttcatggcgtttattttatttctgatcatatttttctgtctgcagtcctttgtcctgttctgctgtgtagctgcgggaaatgacccggcttcccagctgatctcagatcaggaacagatggactatatcagaacctggatggaaaatcaccaaatgtaaaaagcctaaaaaacaaaccgcagggagacattccgtaaatctccttctgcggtttcttacataatctatgacgaatcagagacttgctctgatcaccttaggcttgcagcccgcgtcttccagagcctttacaatctgatttttatgatcggttccaaaggcctccatagttactttcagctctacggccgcattacggttggtggtaacaaactggttatggtcaagcttaataacattgccctgattctgagctatgatgcttgccacacgtaccagctctcctgctttatccggaatcagtacagaaactgtaaaaatacggtctctctggatcagtccgtgctggactacagaggacatggtaattacatccatatttcctccgcttaaaatagacactactttttttccggtaaagtccagatggcgaagagccgccacagtcagaagtccggagttttctacgatcattttatgattttcaaccatatccagaaaagccatgatcagctcatcatcttcaatggtaatgatgctgtccagattttcctgaagatacgggaagatatgctcgcccggagtctgcactgcagtaccgtccgctatggtatttacatgaggaagggttacaacttctcctttttccagagacgctttcatacaggctgctcctgccggctctactccgatcaccctgatatgaggattcagaagcttcgcaagagtggaaacaccggtagccagaccgccgccgccaataggcacaagaatatagtctacaagaggaagctcctggacgatctccatggcaatggtaccctgtccggtggcaactgccggatcatcaaagggatggataaacgtatagccttccttttctgccagctccagagcataagcgcaggcttcatcatagacatcgcccttcaggatcacctctgcgccatagctttttgtccgttccaccttaataagaggcgttgtggtaggcattacgatgaccgcctttaccccgaatttgtgagcagcataggcaacaccctgagcgtgatttccggctgaagcagtgatcagtcctttttctctttcctcatctgacagcgtgctgatcttataataggctccccgcactttgtaagcgcctgtcctctgcatgttctccggcttcagaaaaactctgtttccggttagctcggaaaaataactgcttttgatcagctttgtctcctgggttactttttttacaatctctgaggcttcctcaaaattctccagtgtaagcatattcattttctccttcccgtattcttaatcttctttttcgtttacatcaaacaatgcatttacaaaagtatctgcatcaaacttctgaagatcgtcaatagtttctcccactccaatatattttaccgggatatcaagctctgactggatcgcaactgcaattccgcctttggctgtaccgtcaagcttagtcagaatgattcctgttacattggcaacctctgcaaactgctttgcctgagtaagagcattctgtccggtggttccgtcaagtacaaccagagtttcaagataagcttccggatactcccgctccagaatacggtagatctttctcagctcttccatcagatttttcttgttatgaaggcggcctgctgtatcgcagagaagcacgtctgcgtttcgggcctttgctgcagctactgcgtcatagacaacagaggccggatccgctcctgactgtccgccgataatctccacgccggcgcggtctgcccactgggaaagctgctctccggcagctgcacggaaggtatctgctgccgccagaatcacctttttcccttcatcctttaattttcctgccagcttgcctacagaagtggtttttcctactccgttgacgccaatcattaaaattacagatttacggttttcaaactcatattctgtgctgtctaccctcatctgatctttgatgctgtcgatcagaagctgcttgcattccatcgggtttttgatatgcttttccgcaacctgtttcttcagattttccagaattgcagaggtggcgttgatgccgatatcccccattacaagaatctcttccagctcttcataaaagtcctcgtctatactggaatatccgctgaaaatggagtcaaaccccgctacaatattatctcttgtttttgccagtccgctgacaagccgtttaaaaaagccctttttttcttcagccatactcatgcctccttttatttgctcagctgattttctacaagatccacagaaaccagtgttgacacacccttttcctgcatggtgataccataaagcctgtctgctgcgttcatggttccacgcctgtgtgtaattataataaactgtgtatttttcgtcaacttctgaagatacgaagcaaaacgtcctacattggaatcatccagggccgcctcaatctcatccagcagacagaacggagacggtttcagattttggatagcaaaaagaagggctatggcagtcagagccttctctccgccggaaagctgcatcatattctgcagttttttgcccggtggctgggaaatgatcttaatccctgcttccagaatatcctcatcttcagcaagctccagagttccttttcctccgccgaacagttccttaaaggccttatcaaactctctctggatatcatgaaatttttctgcaaactgtctgcgcattccttcatccagctcctggataatactttccagagttttttctgcctgtaccagatcctcatactgtccggaaaggaaggtatgtctttccagaaggtttttatattcttcaatggcattgacatttacagaaccaagtctgcggatttcatccttgatcctggaaatattttttttcatttcctgtctgtcattaagctcctcttttctgtgggaaagagcgctgtttggagtgatctcatattcctcccacatataggagatctgactttccctctgctcttccaccttttcctcctggcttttcagccggaaacactccttatcaagaagagaggttctttctgatagctgatcccgcttttcaaaaaatgccttgtggcttgtatttctctcttccttctgctgctgtttctcttccttctgttcctgaagttcctgatccagcttttcacaggcctccaccgcgtttttcagattctggattccctcctgcctgtgctttgtctcttcttcacttttcttgagattttcttcaagctcacggctttctctctgaaagctttccatctctcctaaaagacggatcatgttttcctgaaggaagtgttctttctgagacagagaggattcttccagacgaagctcctccagctcctttgttttggatgcttcctcagccttccattcctccagttctttctgtttggtttcaataaaggtttccagttccttctcatccctctgagaagcctccagttcctttgcaatgctggaatgatctgccctgatctccactgcctgacggcgcagctcttccttttctctgtcgatctggccgtagcttttctgaatatcagcttccttttcttccagctgcttcagattcattccggctgtattctgttccacatactgctgtcttagtttttcctggaaatccgcaatcgcatctctcagaacatttctcctgctgcgattatctccgatttccttctgaagctcctgaagctcttttttcaaaagctccacgctgcgctccagctcctcgatctctcgtcttcgtccaaggagattactgttatttttaaaggctccacctgtcatggaaccgccgggatttaaggattctccttcaatggtaaccatacggaggctgtgcctgtatttttttccaatagcaatggcatgatcaatatgatccactaccagaacccgtcccagaaggtactgtaccagcccgctgtactgagcttctgcctgaaccagcgtatctgctgttccgatcacgccttcttctctcagcacttctctttgagaaataccgcctcttccgctcatattagacaaaggaagaaaggtagcccggccaaagcggtttttcttcagaaatccaatcatccttttagctgtctgttcattatctgtgacaatgttctgaatgcttcctccaagagcagtctcaatggcgatctcgtaatctttttgtacatggatgatgtctgccactactccgtggattcccggttctctgcttttctgttccattacgcggcgaatactgtttccgtatccgtcataccgctctgtaagattttttaaagattccaggcgggaggactctctgtgataggctgcctggccgttctccatctgtctgctctgatccttcagtttttcctgaagcttctgaacctcaccatccagacgcacacactcttcattcatagaagcgatggtatgggtcacgctgtcatatctggactgcgctttgctcttttcagatgcaagagactcctcttctgtttttaaacgaaggatgcgctggctgacagcagccttacggatatccagctgctccatcattgcgtcgaaacgctgggcctttcctttggtggtggcacggctgttcaggatttcaataatctcattttttccttcttctacagctgaggtacatgctgccacttcagcctgaatggtttccagccgattgttttcttctttcaggcggttccgctgctctctcagtttttcatgaagagcttccttttcctgtgtaagagtttctttttccttttcacgtttttccagttcttccttcaaaacgcccagacggttccggtaatgatcactgttctgccgtcctgcatggatctgctcttccagaatctggatctggctttcatactgctgtctggaaagagcattctgctgctgcttttccttcagctcttcaagtcttgtattcagagtctccagttcctgttccagacgctcatattctacctttgtctgctcatacgcctcttttgtctcagaaagctcttcctgtgctctttctgacttttctgccagctctttcagaatatgccctgtttcctcataatccagaagaaaaagatttacatccagatcacgaagctcttctctttttgtaagatagatctttgctgtttccgactgcttttccagaggttccagctgcctggtcagctcggtcagaatatctgtcacacgtacaagattctggtgttcttcctccagcttcttgatcgtagtattttttctccgtttaaactttacaattcccgcagcctcgtcaaaaagctcccgtcgttcctccggctttccactcaggattttatcaatctgcccctgaccgataatagagtaaccctccttaccgataccggtatcatagaacatttcctgaatatctttcagacggcagtggcttccattgatcagatattcactttctccggaacggtacagccgtctggtaaccgtaacttcattaaaatccaccggaagcttatggtcgctgttatccagggtaatggcaactgaagcaaagcttaaaggtttgcggagctctgttccggaaaaaataacatcctgcatatttccgccgcggagctgtttggcactctgttcgcccagcacccagcggaccgcatcgcctacattactttttccactgccattcggtcctacaatacctgtgattccattatgaaattcaaaattgatcttctgggcaaaggatttgaatccgtgtacctctatgttttttaaatacatatttcacctttactgtttgattttccggagcgcctggtaggctgcagcctgttctgcggcttttttcgtatgtccggcaccgtttcctgcaggaataccgttgatccttacctcaacttcaaactgcttgttgtgatccggtccgctttctccggtaagcacatattccaccggctgctttccgtcctcctgcacaagctcctggaggattgtcttgctgtcgtaaaaaagctgttttctctctatatcattcagaatgaatttcagcacaaattccctggctctctcaaaaccgccgtccagataaatcgcgcccagaagcgcctctgtggcatccgagacaatggaatcacgcattcttcctcctgtcatatcctctccccttcccagaagaagatattccggcagtccaaactgtcttgcacaataggcaagactgggttcacatacaaggcttgctcttttttttgtcagctcaccttccggaatctgcggaaaacgggcataaagcacatcactgctgatcagctccagaacagcgtctcccagaaactcaagtctctcgttacagcccagctttccgagctttttttcattggcgtaggagctgtgtgtcagcgcctgacgcagtaattttttattgcggaacctgtagccgatcttctgttccaactgatccataatctttccctctttctgttaattctcttgatggccttccggctttgcaggaggctgaatccgctctgcgattttttcattgatcttctgctgtttaaactgaacgcactggaaaaccgcatttttaatttccaccgcttttgcgcttccatgagtctttaccacaagtcctttcagacccagaagaggcgcgccgccgtatttcgttgtatcaaaatccttcagagtttctttcagagcaggcttgatcaaaagcgctcctattttacttctgagattcttcatcatgccgcccttgatctttttgatcagagagccgctgacaccttcataaagcttgaggatcacatttcccacaaaggcctcgcacacgattacgtccgcatagccggaaggtatgtctcttgcctcaatacttccaataaaattaatgccctccgtttctttcagaagcgggaaggtttcttttacaagagcgtttcccttttcttcctccgccccgttattgacaatggctactctggggtttttgattcccacaacctgctccatatagattgaacccatttttgcaaactgaaccagatgagatggtctggcgtccacattcgccccgcagtcgatcagaagacttacgccttccatggtagggatcagaggcgccagcggaggacgctccactcctttggatctgccaacaagcacctgtccacccacaagaacagcgcctgtactgcctgaggaaacaaaagcgtctgcctcatgtttttttacaagattcagtcccactacaatggaagaatccttttttttgcggattgcaaacaccggaggctctgctgtttcgatcacctctgaggtgtgtacgatctgtattctttcttcagggtatccctgatatttatttaattcctttttgatcacgtcttcaagtccggtaaggatcacaaaaatatcctcacgttcctttacggcttctacggctgcctttaccggttcctcaggtgcattgtcgcctcccatggcatccacaactacttttactaattctgccataatacgcctcctgttaaaatttcaaactttatcatactaaatctgaaggggtaaagtcaagagatgtcagaaaattaaagggtgttttgcagattctctccatccaggactgcctctgtaagcctgtccccctcataggtcagcttcagcgaaaaaaacggggcatcttccttcagaagtttcaggaagatcttatctccctcccagagattcagattcagaagctcatccttttttacccattccagaacgccttcatcacagtccttcacctctccggtgaaaccatctgctgtataaagacacatatattctgttccgtaatccttctgtgtaaaggtaacgattccccggaatttccaggaggtcagcttcagtccggtttcctcatatgcctctcttaaaagacattcctccggactttctccctcttcaaaatgtcccccgataccgatccatttatctttatttacatcatttttctttgacactctgtgaagcatcagatatgcttcctctttttctacataacaaagcgttgtcatgggtctttttttcacagtccttcacctcctgcaaaaatttattttctgttctgggcttcgattttttccgcaagatcgttcaggtaaacccagcggtccattttttcttccagaagagcttccgcctcttctttttcctttgtcagctcattgagctttccggaatttgtggcattggccataatatcctgatccagcttttcaatctttgcttccagcttcgcaatatcctcatcaatagtatcgtattccctctgttccttataagaaaatttaagctttgtgggacggttttgtttccaggtctttgcagaatccttttctccggaatcagagacttctctgcttccttctgatctttttccggaatcagaatcaatgctgtctccgaaccgtctctttttcgcttccagataatccgtataaccaccctcatactgtgtgaggtttcctcttctgtcaaactcaaaaatccggtctgcaatattgtccaggaaataccggtcatgagacacagcgatcacgattccagcaaaggaatccagatagtcctccagaatggtcagtgtgggaatatcaatatcatttgtgatctcgtcaagaagcaggacatttggcgctgctgcaagcactttcagaaggtacaggcgcttcttctctcctccggaaagcttttctattggcgcatactgcatggaagaatcaaacagaaactgctccagaagctttgttgcactgatcagtccgtcctttgtgggaatatactctgcaacatccttaatataatcaattacccgctgactggtgttcatttcctcaatttcctgagaaaaataaccgatctttacggtttctccaatctctaccgccccgctgtccggctgtatgatacctgcaataattttaagaagcgtagatttgccacagccgttgggtccgatgattcccagccgctgatttttcagcacaatgtagtcaaaatcccggatgcataccttatctccaaagcttttggaaatatgatgaagctcaattgtttttttgcccattcttgtctctacagaatcaatctccacgtttttgtcgcggacaggcgcagcgccgtttttcagtgtttccagacggtcaagccttgctctctgcttggtagtccttgcacgacagcctcgttttgcccattccagctccattctgagaatactctggcgtttccgctctgacgccagctccatttcttctctctctgctttcatttccagaaactgagaatattttgcctcataggtataaatctttccgtgacttagctccagaatcttatttgtaacacggtccagaaaataccggtcatgagtcaccatgatcactactcccttaaaacggttcagataatcttccagccatcctgccatttcattgtccagatggttggtaggctcatccagaataagaacatccgtgggattaatgagaactctggccagagcaactctttttttctgacctccggaaagatgactgatctcctcctcatgatccgcaatgccaagtttgttcaggatcatatgagcatctgtttccggattccagtcctgctcccgctttcctgcagtcacataagataggattgtagctccctcaggaaattccgggtgctgggaaaggcaggaaatgcgcagcccgttctgcatgatcacctgtccctcgtccggttcctctgttcctgccagaatccttaaaaatgttgtttttcctgttccgttaattccgatcagaccaatcttatcaccctgatggattcccactgaaatatcatcaaaaatcactttatcgccataggttttgctgatgtgttccatatttaaaatattcatatcattcttctctctgtactttcttatttattttactgtaaatactcaaattgaaaaaatatatcatgctctcctgtgtttaatccgcacgatctgtctgcacaggtaagtattcttttgtgtccacatataacagatcccattgtgcaaacttccgtatttgtttattttgaaacaacaaaaactcttcctaataaaaaacatttcatttacattgcttctgtcatttttatgattttattttttctcattttccgcctttggaaacctcttcacatagtagatcacaaacagcactgccgtaatgccccaggataccggataactgagcataattgtctcaattcccggaaaaacaggaagaacggccagcatccaggtaatcctcatgatgcacacgccgccgcaggttaaaatcacaggcacaagcacttttcctgctccgcggagcgcgccggaaagaatcccaatggctacataaagaaaataggacggcatcagatagcgcatcatataaacaccgatctctaccacctggttatctgttgtaaacagcctgtacaaaggctctgcaaaaacgatcagcaggccgctgagcagaatcgccgagctgtaggacattcccagacacacccgcacactttttcgcattcgtcttgtttttcctgcgccataattctgtcccacaaaggtagtaatcgcaatggaaaaggcattgactaccatccagaatacggcatcgattttcccaaaagtgccccaggcagctacatagtcggttcccagacgatttacaaatacctgtatcacaatatttgccacacagtacatggcagcctcaatacctgccggaaccccgattcgcagaattgctttaagcgaagcgccgtagaaacagatcttttttatttccagccggaaaaatccatgatctctcatcagcattcccgtaacaagaactgcgctgactccctgacaggatactgtggcaatggcaactccccggactcccattccggcagccaccaccagaacaatgtccagaacaatatttaaaatacaggcagtcatcagaacataaagaggtcttctggaatctcccattgcccgaagcacagaggcccccatattataaacaagattaaaaacaatccccataaaataaatatgaagataggttctggaatctgccatcagctcaaccggtgtattcattgcttccagaactgcatctgacagaaggaatcccgccactccgataatcgctcctgctgccagagaaaaggcaaaagacgtgtgtacggttttgtccagatttttcctgtcctgagctccaaaaaactgagacacaacgaccgcagcaccggaggtaagaccaacaaacacctcaacgatcaggttgacaatctgattgaccgagcctcctactgccgccagtgcttccttacccacaaaacgaccgacaacaattgtgtcggccgtattataaatctgctgaaaaaaagttccgaatacaatcggaaagaaaaataataaaagctgcttccagatcacaccctcggtaatctgatttcttttgttcatatccgttctccccccgagataaaaattcctctgctatgcagtatagcagaggagctgaggaaaatcaattttttgttagtttaatattttgagattatgtgagtgtttcgcatacccgctgcgggaaatttccatctggagttctctcaggcggttctctttatgccggaatgtctcaggagcatcctgaaaatgataactactgcagatacttccaagcttcatcattacggctctccttgcatatcctgcggcaagacttattttcaggtatccatataaaagacaacaactggctttgtggaaaattccgttttcataccgggaatggcttctcagataagcggccatacaaaatacaagaatcacagcaaaagaaataattgaaatctgttctgcaaacgtcatgatcaccgacctcctttaaagaagcatctttattgttgtctatatactaactctttactctgtaattgtcaatctttttattgttaaataaatattaatctgattttatctgttgatgtgaacaggggatttttatttttccattcctgataagttcatttcgcatcattatcctgaatcagatactgtttccaatggcatcaataatttctttgtagtccaggtcttccaaaccatttcccgcagtggagggataatggatgacattattccagttttccgtaacaacactccattcctcttcataaggcgcaaacaaaaccagccgcttagatgagtcagaaatctgccccggacattgctcatctccccaccaggaagtcagctctccaaaagattctgccatcccagaaggatagcagggagatttttttccatatcccagcttatgtgtaggagcatctgtccatactacaattatatttcttcttttatcgcctcccggagtccattttgacttaattgcatatcccaaagcctccagaccgtcttccggtgtatccccgcctccttttgcatgaatactttttacacacctttcaaaatctttcgactgttcaggcagccggaaaaaatcagttgtcatcattgcagaatcaccatctgccagataatcccgaaaagcaataacccgaatccgcatttcgttaatatgctttccttttctctccatggccgctgtcacatcatggtaaaaattcaacgcattgttttttactgtattgatcaccggacgcatactggctgttgcgtcaatacaaaataccatgtctacattatacttaaacaaataattttctcccattctcttttctcccaacgtatctttttatgcttttagaattcgtatcattactggctgacatcattcttatagatcttccggtttataaaaataattgcagaaatcctccgactccttttcctggtgaataattacttctggttttttttcaaaagtcactgtatcctcttcttcccatttcagttcttccggcatcttttttacctttgtcccacattttccgcaaaaatttgaatcctctttcagccttgctccgcaatatccgcaaaacatatcgtcctctcctttttatcttatgattttatttattttataaatctatttttactgcaagtctcctgccgtataaaaaaactcctctccattaccggtgttttcctcacttttttcacttacgtttgatgttaaatgcagtatcagctttgatgaactttcccgatcaggttccaaatcctcccatttttcaagaaattctgcaaggctgatgcgtttttccggatcaggcaccagcattttttccaggatcatcctgttcccggaatctgtaatatggtgcagtctgacttcccctttgtcaagaagggcctcaaacacataatgatatttatcgtgatcgaaatccggcagttctcctgtcagaatctgatgaaaaatcaaacccagagcaaaaacatcaattttgacagacaaccgtttatcttcatcacctataatagcccgggccgtttccggcgcaaaatatacaggatccccatgaatttctttattagcgggaagaacctctctttcccagaaacaattatcaaaatcaatcagctttgccgtcactgctcctgattccaggcgcttcaggagaatattctcaggtttcagatcgccatgcacgattccattttcatgaagtctgtaaacactgtgtgccagtattctgcataatttcagtttttcctgctcgcacaaatctccgatagtttcccatccaattccacgaattttttccatggtcatgtaatacttggttccacacctgaaaaattcgcagatgtttaccagatttccatcggaagcttcattcagcgtgctgtataaggagacagatctgttttcgtacttctcacagatttttcttttgcgcgctgtcatttcaggtccaaaaagactttcatctaccggatagaccggcgccagaaactccttgataaaataatcgcatccgttctttttggcaaatgcccattttgaaaaaccactgttgtcggtctttaaatcgccgtctatgacatatccgttaattactttcatttttaattttcctgataagcttcatattccagcttatattccttccattcacttaacagtctctcttttccactgtcttcacaggaatatttctgctctaattcctgtaatcttgcagaaaagtaatgtttcatatggacaaaactgccgaatcctgccgcatatatacacatggtatagtcatctccggatattctttttaacagctgatccatctcttttttccattgttccatgctttctgatcttttcatggttttcaaaagaaaacgttcaaattccatcggagaacgaagataaccaaaacatccgtcggttgccgaaataatcagtgcaggcagctgttctatacctgttcttcgatttaaaacataaggatgggaagcagagatcacatttttcatgggtgcatcctcggaaagattttccagtgcatccgtattggcaatatcatccacagtcacctgatgcagaccgctgctgtccagaatatatcctctggaatctcctgcccagataaattcagtcactaaagcatttgatttccagggagcaatcaaaaccagtgacagagtagatggaaattccttcatcagattacctttcagcatactttttccacttccaagctcagaacatgcctttaaatatcgatctatccaacgtttcagcttttttacctctttagatccgaaacacgctttcagatcgtccggaagggcagaaaaccatctgcgggacacttcggcaagcactctggaagccacataggctccactgtgtccttcaaaaaatggatataccttagcaccgctgcctccgcttccatcaaaaacaccgatgattcctttttccctgtctatgtcaaaaaagaagctgtcctccccttttcccgacactttttctctggtcaggcaaaagcagtaatctgtcacggttctgaaatccgattttctgtttccgtcattacaatcctgcttttttgttttattgttcatctgaactgtaatcctcctgactatatccgtctgaagatatgacttcctgttcgctttccggtattttatcttcatctgtcattctttctgttatttcttcactttctgcctctccggcatcaaaaaaatcttcttcagctgtattcatatccagatcttctcttatttcagctatctgaccttccagttcattcatctgcttttcctgcgcttcaatctgttttttctgagctttctgtttttctgcaatgcccttatattttatttgttgttcctgaagctgagcttccagcttttccattcgttccagtttctgtcccagattatcgtttctcctctgcaatgctctgatataaatactaccggacaaaatcaatactgcaacacagattataattgatactttcactattccggatataccggatacttttttctgttttcctccgttttgctttaattttctctttgtatcctgaaaatcaaagggcgaactctccagattttccgaccggtaaaatatttcgtcctcctcttttgactttgtatcggacaaattcctgcctgtttttaatgttttctccaaaggctcttccttttcttctttatctgaaataaaatcaagagaaatccctttccattggggcaaagtcgtctgctcacttccgcaaaaaggacatattttttcgccgttttttattctttcaccacatgttccacaatacatatcatccttcctcatctttccatgccacatacctgacatcttttttcactttcatcattcctgccgtcacaatagctgcatttccatccacagtcagtcggaatatattgatatatcacttttacctccattgtcttttgtgacagagaaccggctgacgcaggaaccaatgccgatttcgtaccatatacaattccggtctttatcggaacttctgtttttttaatcttctctttttcgtcttttattacctcatagcaaaatgcctcaagactctcttctgttttctcgactatatcctctgttttttcactgtaatacaatgcgccggagtctttttccgatcctccggactcaccttttatacaaaattttacaataaaaaccgataccagtactgccaagcaaactacaattaaaatttccataccgttcccctctcaaccttcaacctgtttgtaaaccttattttgggatatcatttattctctttctttccttttcgtcttattaattttattttcttcataatcttttttcaatctgtggcaactgataggggcagattattaaaaaacatgatttttaaaataccttagttcccatacttttaaataagaaatccaccagtctcggatcgatgactgatggatttcttatgattgaattctatttcattatgccggcagaagtgggactttttatttattactttccaggagaaaagcttttctttaacaaaaaaacagaacccctttcaggatcctgtttttacgttttcattagtcttcaactttaatgatttctttcttattgtagcttccgcatgctttacaaactctatgaggcatcatcagggcgccgcatttgctgcattttaccaggttcggagcactcatcttccagtttgcacgtcttttatcgcgtcttgctttagatgttttgttctttggacatatggacataggttacacctccttaaatttactaaatatatcactgatagctgccatgcggggatccttcggctcctctgcgcatccgcagggaccgtcgttgaggtttttcccacactggctgcagatgcctttgcagtcgtctctgcagaggaccttcaaaggccagctcatcagtacctcaagatagaccaaccggtccacatccaggtccattcctgtgagatagttgctttcatccagatcattgacccgttcctcatccgtaagcttcatatccagcttgcgctcaatatgacatggaatttcaaccttaacctgttccagacaacggtcacagggaatgctcactgtcacacatgtattgccggtcagctcaagaaccttatttccggtatttgtaatgactaaatctaccggttctttttttaatacaggaaactcacccatctggaaagaaactgtttccatctccagctctgtgcttacctgtattgtttttccttcacaggatgtaacatctgataaatgaatctgcataattatctcctattcacacttaatcaattatacataggagggcttcctttgtcaaggatttttaccttctgttacgacaattctgttattttttgtcaaaaatgtccggagggctcataagctccagaggataatcgcccagatgctccaccttgaatccgtttgccttgtatttttcgtaatcaaaagcattcagctcatcacaggccagcttatgaaactcataaaaattcggccagtattcatatccatctcccaggttatgagtaagatatgcatctgcaatatcgcagcccatctttggcgccacataaaatgcccccatagccaggacattcacaccatttccggtaattgcccgaagagctgccggaacactttctactactccggaaaatactccagggcatttacctgccgcaatgtggattcccattcctgttccacagaaaataagagcacgttcaaattctccttctgatatcatagaaccaacccttagtccgattctgtgaaacataagatctgtatcctcatcctcaggggactgcactcccacatctgtcactgtccatccatattctttcaggtgagcaactactgcttcttttagaggaaaacctgcaaaatctgcgcctacaagaatctgcttatctttaatcgtcttcatatttttcccctcctattttgtactcttaggtttctggctgaagtagtcgattacaagggcaagtatcagaacagcgccccatatcagtgttacataataggtagaaacgcttctgaaacgattgatacctgattcaatcatcttcagaagaacaattgctgtgatcacaccggaaatctttccttttccgccatttggacttacgccgcccagaaccaccagaagaatcgcctgcatcgtataattgcttccataatctgctctggctgaagaatatgttgccagcatcatcagaccgcctaaagctgcacagactgatgaagtaatataggtacggaataaaagcgcatgggtattgatcccggaaaatttggcaacatgggcgttggttccataaagccggagttttgttccatatgtacatttttcaagcataaaccagatgagcactgctaccacaataaacacgatcagtcttcttggaataaatcccataaaattccctgagaaaaaatcgcagaactgttttgggaatgaggatactgcagatccgtttgtaaatacaatgcatagtcctgtaagaagctcattcatacccagggtagccagtataggcggcactcccaggcatgagatcaaaaaagcattggcacttcccaccacaacgccagtcaaaatagcgatcagaaagatcacagctgaaaatgacagaggcatgggaccctcttctccaaaaaaatgcatcatggtgtatacactgagaatagaagccatatttgctgttcctactacagagagatcgattcctccggtgatcatgcacaacatgcatcccagagccataagtccgtattccggaaactgtcctgccatagtcagaaaattaattcctgtaaaaaatttttctgcctgagtaaacatcataaatatcagccagcaggccatgatcaaaagcagtctgctcatttcaggattttttctgtaaatacttttgactttgttcatcacgcaccctcctttgctgttttcttcctgcttctggagggcctggaggcctgcagggcagtcagagatacgccgatcacaataacaagacctacaaatacatcactccatgttgtgggaattccaagaagaatcatggaattctgtaccagaatgatcaggaaagtaccaagcatacaccctgtaagggtacctgctcctcctgtaagagcaacgcctcccaaaaccactccggctatgatattcatctccataccaagcatatttgtcggatggcactgctgcatcatacatacacgacagattccaccaatagaagcaattactccgatcataatatacatgataaattttgttcttttcacattaaagcctgcggtatgtgcgctgagagcatttccgcctattgcataaattccccgcccaaaaatggtatagcgaagaacaaaatgcatcagagcacataccagcacaagaataataaatgtatagggaagaatggaactgagtccgtttaccttatttgttgccgtaacaaaagaagcggttccaaattccttcataccggccggaatcaccgacaactgatttgcccgtaatgttccctgcataaatccctgaaaaatactggctgtgccaagtgttacgatcatggcattcagattcaggtatccgataaaaaatccgttgatcgcccccagaagagctccgatcagaattgcgatcacaaatgccagaagcacatttccctcatattctctgtcaaggagaaattttgtggtggcatatgcggaaagcgaagccagtgccggaaaagaaacatcaataccgcctgcgatcagggccataaactctgctatggcaaaaagtcccggtacgatcatggcgctcagaagatccactatattatttcctgtaaaaaactgtccggaacgaacctgaactactattcccagagcaataataatcaggaatatatatggttcatttgactgaaatatttttctgatttttttgttcatatgactgcctcctacatcatatcatcaatgatcatctgctcactgaccttctgcgtatcatattcggacttgatttttccgtttctgatcacaagaactctggaacagttttgaattacctctggaagatcatctgaaatgataataactccaagcccctgatttgccagcttctgcagtaccatatgtatgtcatgttttgatccaatgtctactcccacagttggaccattgagaatcagtacatcaagattgcatgcaagccattttgccagtacaattctctgctggtttcctccggaaagagttgttgccggattatcaggattctttgttttgatttccagttcttttacccatttttctacttcctcattgcgtttcttcagatcaaacattccatttttctttttcagcctgtcaatctctgatatgataatattatctgcaatggactgcgtaagaaaaagcccttctgaaagtctgtcctccggaacatagccgattttgttatcaatagcctcccgggggtttgtgattttcacaggtgtaccgtctttcaaaatctgaccggagtctgcaggtttcagcccaaacatagaaagcgccagctctgtacgtccggaatcaagaagtcctgtgattcccaggatctcaccttttcggagagagaaactgatatcggaaaaagctccctcaagagtaagattttttaattccagaacaggtttatccgatacattttcaggcgtaaagatctgatcactgaattctcttcctgtcatataataggtaaacttcttatcatccagctcctttgtacttcctgtcgcaatcatttctccattccggaaaatcgtaaatctgtcagaaatctcaaatacctcatttaatttatggctgataaacaggattgcaattccctgttcctttaatttcaaaataattttaaataatgcagttacttctttttttgtcagagcagttgtaggctcatccataatgatcagccgggcattggacataagcgctctggaaatcgccaccatctgcttctgtgcaacagtcagctcctggactttctgatccagatctacttcaaaattaattttcgccactgcctcctgagcaatttttctcacttctttccatcgcactgtttttttgcctgatgcaagttctgtattcaatgccagattttctgcaactgtcagattgggaaacaatgcaaaatcctgataaattacctggattcccatattgatcgcatcaataggagaaattttttccagtttttttcctccaaattctatagttccgccatccctttgatacacgccggatataattttgataatcgttgattttccacagccattttctcccgccagacagtggatctcgcctggaagaatctccagtgatacgtccttaagcgcatgaacatttccaaaagaaatttttacatgttccgcttttaacaagctctgcgtcataagctcctcctctccgctctctcatatcccattcacggatattctgaaaggaatccgccggctgttacaccggcggttcctgttcgctcataaaatcagaatccaaggccatctacattttcagcatcaattgtaatccagccctgtccttccagaacggtttcatttccttcccggaaattcatttctgtataaccgtccacattcagatttagtggagcagcaatctcttcaccattgagcaccttgcatgccagatttaccattgcctcaccggattttgcaggatcccacaaagtcagggatttcagaactccggatttcaaaagctctgcattgtccgccggcatacctgttccggaagtaaaaaacttatctacaagaccaagctcctgaattgctcttgcaacaccaggtgcgtcaaaagaagatgttcccatgatgcccttcaggtcagggtaggttttaatcagctcttttgccacattataagcggtatcaccattatcatcagattctacacgtggattttcttccagaagagtcatatttggataatgctctttctgatactctactgctgcatctgcccattcattatgagaaccatttgtaagagaagctaccatggtggtataaactccctcttctcccattgcttctgcaagattctgcataataaaagctccatatccctcgtttgaaaaagcctcaatgtcataatctacattttccagatcggctccctcatgggtaataactacaattcctgcatccttcgcttttttcaaagtagaatccatggattccatatctacaggaactacacaaatagcatctacgccctgagcgatcaggtcttctacaagctgtgcctgtcttgtggcatcaatggttcctgtatcaatctgataacagtttacccctgttttttctgcaaattcctttacaccggtatccatacgaacaaaccagggattcgtggaatccttaggtacaactgcaatctcccactcttcttctgctgccttgatcacagactcatcttttgtgggatcaggttcctctgatgcatatacagatgtacaggttcctactgtacctgctgccagcattgcacataaagtcactgctattgtttttttcattttgaattcctcctttgtttttccgtgtcattttaatatttgaaaaacgatccatacactgcaaaagattttcggattatcaattgtcccccttcctgcttttgttaattgtttttattgtttgaatcgtttcaaaatatttgttaattttatgcggcactttctgtaccgcacattgttttatcaacaggattcccggataataattttctgaggaagcacaatctgctccgtttttccagtctgcttcattctttttactacctcccacaacgtctttccaaaaagctcctgatcctgttccgctgtagtaagtcttggattgatatatcctgaaagatccagattatcaaaaccaactattccaaaatcaccaggaatcgagtatcctttttcattgattgccctcatcattccaatcgccaggtaatcagaagttgcaatccaggcttttgggagattctcttttttgttatgttccagaagccatttcatatacagatagctgtttctgagtttgtccagagataaggacttatcttcaaatacgcattcttcaggatttttaaatccataataatgcattgcttctataaagctgtcccgtctctttctgatattttccaactctgtaagttccgccatcagtccaatagtctgatatcctttttctttcagaagcctgactaattcaaaaacaacctgatgattttcataatttacactggatgtgttttttacaaaagtctgtctgtctgccagaattacatgcatatctttttttaccagacgacgtatctctgtttcatcgttatatccgttaaatatgattaccgaagaaccctgcttgcagcttcccagaagacgcagctgcttcctttctctctcgtcagaatactcatagccggaaatatttacagaatatcctgctttataagcatattccatcaaagcactgatgatattggtataaaaggcattcctgagattaggagtaagtacataaatagttttactgtttttactcctaagtgaacttgccagtgcatccggagtataatccaggtcattaatagcctgttgcaccttctctgccttttccggtgaaacagatactgttccattcagataattggaaaccgtcccaaccgaaacacctgcatatttggctacctgggtaatggtaactttttttttcgtcatattatttaatccttccataaacaggcgttttgaaacgtttcattggattcagcatacaatcatttttcctgaatgtcaatatgttttattatttttgtcattttataacattttaaaacgcctacttttgtaatatatgcacaaaccataaacaagcatctctgttcattgtctgtagtcctgaacaataatagatataaaattaaaatgtacttttatatctatacatgagaaaactcacccctttcggggtgagccttcctgaaaatcttatataatcacaactgtctttttatacaagagcaactgtctctctgcagattgcaagctcttcgtttgtaggaattactgcaaccttaactttggaatccggtgtggagatcacgatctcctcgccgcgttttttgttgatctctttgtcgatggagattcccaggtagccaaggtaagagcatacgtcctcacgtacaaggttgtcgttctcaccgatacctgctgtaaacacgattgcgtctacaccattcatagctgcaacatatccgcctacatattttgcaataccatagccaagagcctctcttgcgttctttgcatctacattgccttctgctgctgcatcttccaggtcacgcatatcgctggaaagtccggacattccgtacagaccggattttttgttcaggacatccataacgcctgcaatatccagattttctttctttgcaatgaactccatgatagccggatcaatgcttccggaacgtgttcccatgatcagaccctcaagcggagtcatacccatggaagtatcaatgcatttgccgtttacaactgcgctgacagatgatccgttgcccaggtggcatacaataactttggagttttctttgtccagacccaggaattcaaccgcacgtttggaaacaaagctgtgggaagttccgtggaaaccatatcttctgatcttgtagtttttgtaataatcaagcggcagaccatagagatatgctttcggcggcattgtctgatggaaagcagtatcaaatacgccgacctgcggtacgccaggcataagctctgagcacacgcggataccgatcaggtttgccgggttatgaagaggagcaaggtcgttgcactcttccactgctttgatcatctcatctgtgataactgcagaagaagcaaatttctctccgccgtgtacaacacgatgaccgatggcatctacttctttcaggctcttgattgcgcctgttttttcatttgtaagagcgtcaagcaccatctggattgcctctttatgtgtgggcatcggagcttctgtgatctctttttcaccgccggcttttttgtaaaccagtcttccgtcaattccgattctctcgcagagaccttttgcaagaactgcctctgtatcagagttgataagctgatattttaaggaagaacttccacagttaattaccaatacattcatgatttttactctcctattctttgtatgtactacgatccataatcaaaaacagcctcgacaggactgcatgcaccggaagaagttttatttgtcttctgcctggcactgtacagcagtaattgctacaacaccaacgatatcgtctgctgagcatcctctggaaaggtcatttaccggttttgcaataccctgagtaacaggtccgtatgcttctgctttagcaagacgctgagccagtttgtatccgatgtttcctgcatccagatccgggaagataagaacgtttgcttttcctgcaacctcgctgccaggagctttggaagcgcctacgcttggaacgatagcagcatcaagctggaattctccgtccagtttcagttccggatgctcttcttttgcgattctggtagcctctaccattttatctacatctgcatgctttgcgctgccctttgtggagtgtgaaagcatggcaacaatcggctcttcctgtaccagaagctggaaagattctgcagaagaagccgcgattgcagaaagctcttccggtgtaggattctggttcagaccggagtcagcaaatacaaatgcgccgtttgcgccgtactcacagttcggaactaccatcaggaagaaagcagataccagcttggttcccggttttgttttcaggatctgcagacacggacgaagtgtatctgctgtagaatggcatgcaccggataccattccgtctgcgtcgcccatcttaaccatcataacaccgtagtatggatactgtgtgtgaagaatctcttttgccttctccggtgtcatgcctttttttgctctcagctcaacaaatttgtcgatgtaagcctgagttctgtcagaagtttccggatcaacaatagtagctccggagatgtcgaatccgccttctgctgcttttgccttaatagtctcctcattaccgatcaggacgatcttggcaacgccctctttcagaatcttgtcagttgcctcaagagttctcatatcctctgtctctggcagtacaattgttttaatgttttcttttgctctttttttgagcacttcaacaaatcccatgattaaaatggctcctttcattatttggcctgacggcccgatgagacgcttctgtaagcatctcacagataagtttattataccccctggtattgcttatttcaagcatttcccactgataattcataatcagaaggtattttttaaggtgcaattttttgtttctgaatgttttgtccagacagaagctgtttcgtttgtttcacagaaaaatctgtgctaaaataaaatcctcaatatttcagaaaaccggagaaatcatatgaacgttacaggaatcattgcagaatataatccctttcatctgggtcatctgcaccagatcacttatgtaagggaaaagctgaactctgattatatcattgtagtcatgagcggagattttgttcagcggggaacccctgcccttctctctaaatatacacgggccgaggccgcccttctgtgcggcgcggatctcgtactggaactgcctgtacaggtttcttctgccagtgcggaattttttgcagggggagctgtttctcttcttaacggattaggagtcgtggatcagttatgtttcggaagcgaagaggggactgtggagggaatgcagctggccgcccgtattttaaacgaggagccgcaaggcttccgtgatcttctgaaaaacagcctgaagcagggaatgtcctttcccgcagccagaagccaggctctcggcaggtatctttgcacgttacattctttgggcgaaaaaaatctgtccgcattttcggacacccttctctcttctcccaataatattctgggaatcgaatactgccgcgcccttctcagacttcacagctccatcaagccagcgacactgaagcgggaaggctccgggtatcatgaccttgcattaaaaaacaatcaggctccttctgcctctgcagtccgtgcttttctttcagaacagagcggccggactccttcatccgacagtgttaaagatttttctgctctggaaaacatgcttcccgctgcctcccttcagcttctgaaaaatgcattttccagacaggaatttcttacagaaaacgaccttgacctgattctgcactactgtcttacaggacaaacatcagaagaactcagtaaatatgcagacgtttctcctgaccttgcagcgcggatcatcaactgcctgaatgattacagaggcttttgtcagtttacagaacttctgaaaacaaaggaactgacacatacaagaatccagagggctcttctgcacattcttcttcagatcagagaaacccctaaagagctttccttcggcagggttctgggattcagaaaaagcgcttcccctcttttaaaagaaataaaaaaaagaggaaccattcccctagtgaccaagccctcttcatcagcgaaaacatttactgcggataaaaaaaaactgctggataccaataccgcagcctccaacatatatgaaagcctgatctgtcataagacaggacgggcctttgttcacgaataccagaaacagatgattctgattccctaaatttcaaaggggaaaacgaaaaatgtcgttttccccttcagaaacctgtaagtctttcctgagtcccggtgctttttcatattctctgatttatctcagtttccacactcaatgctgatctcattaaacttctcaagaatgtcatcaatactcatggcagccttttcctcacctgcgcaatcgatcacactttttccctgatgcatcatcagaagccggcttccataatctaccgcataccggagattatgagtaaccatgatcgttgtcagatgtttttcttttacaattttgtccgtaagctccataataatctctgctgtttttggatccagagctgctgtatgttcatcaaggatcagaaattcaataggcgtcatcgttgacatgagaagagccattgcctgacgctgtcccccggaaagagagcccacttttacatgcattttatcttccagtcccagattcagaggtctcagaagctcccgataatattcaactctgtgtttattcacgcctcttccaagtccaaagcgttttcctttattgtctgccagagacatgttttccagaatggtcatggacggacaggttccaagagacggattctggtacacacggccgatcttttcgtttcttttaaactcttttgcatttgtaatatccctgccgtccagaaggatattccctgactctaccggaatactgccgcagataatattcagcatggaagtttttcccgaaccgttgctgcccaccacagaaagaaactctccatccttaactgtaaggttaaagcctttgaacaggcacatttcattgactgttcccggattgtaatatttataaatgttttttaactcaagcatcgatcttcacctttttctttctttccatgctgatcagaagcacgatcagaaacagcgctgctgtaataagcttcatatcctggggttcaaaatttctcattgcaacagcagtacatgccttgtaaagaacagaaccaagaatcacagccgcagttgctctgataaaggtcagcttccggaacaggctggttccaataataacactggcaaggcctatgaccaccgcgccggttcccatggaaatctcaaacactctttcctcctgacagaaaatacatccggccagagcgatcagtccgtttgcaatagcaagacccaggatttttacatttccctgatcctttgcaagggaagtcaccagcttttcattgtcgcctactgctcttaaaagaaagcccgatttgcttttcatataaaagtcaagtaccagctttgtgatcagcgcaagaatcacgatcacaatcagtgtggcataaggcttcacagcctccggaaaaagattttccagaaagctgtttttaaaaatagtttctttggaaaacagagggacattggagcttcctgctatacggaggttaatggtccacagcgcggtcatcatgataataccggataaaagatcccggacctttccctttacatggatcagtcctgtacatgctccggccagcgcccctgctgcaaaagcagccggaagggtcacatagggatttacgccctttgcgatcaaagctgcggttactgcagcccccaggggaaagcttccgtctgtagtcagatccggaaaatccagtattttatatgtgatataaacacccagagcaagaataccgtagatcagtccctgctcaatgatcgtgataataaaatccatggcctttcaacctccataaaaatctttgttacgcttctgtaatttcttcaaaaacctctgctgccgtctcagtcatttcctccggaatctcgatctccagcttttctgccgccgcagtattcacatacagagatgcctcttcgatcgtttcaaaaggaagctcagaggcttttttctcaccctttaatacctgagcagccatttttccggtctgttttccaagttcaatataatcaagtccctctgctgcaaggcagcccagttttacctgttcgatctcgcttccgaataccgggatttttttctcatttgccatttcaaggattgtgggaagggatgaaacaacagtattgtctgtaaggtttgtcatacagtcaaccttttccagaagcgactgcgcagccagtggaatatccgcggttgttgcaattcccgctgtctcgatcttaaaatcatattctccggcaagctcctcatattcctttactgccgcttcagaattcgcctcgcttgtggtatacatgattccaatggtctctgcttccggaagcatctggcggatcatttcaagctgctgctttaccggaagcttatcgcttgttcctgtgatctcacctacagggtttccctcgtcgtcggcaagctctgctgccagaggatctgtaactgctgtataaataaccggaatacctgcgtccattgctgcattataaagactctgggcgcttggagtggcaattcccaccataagatccactttatccgctgcaaacccgtcagaaatctgtccgcaggttcccatatctgctgctgcattcttatattctacggtaagatttttgccctcttcaatgccttcctctttcagtccttccagaaagccttctctgcagttgtccagagatccatgctctgcaaactgctcgatcccaatagtatactcttcttccgcataaaccgttgctgttcctgccagtgtcattgtcagtaatgctgctcctaatacctttactgttgtttttgttttcatgttgttttctcctctctctacgattctttttgctttaccggaagtatatgccagcctccggcatcctgtctgcgagaaagaaagctgtgatacctgtcctttgaaacaaaaaaccgccccaagctaatgcttgagacggtaataatttcttattatcgcggtaccactcaaattgacaaaatgtccactttctcatgtacaaacatacactcctgattggtaacgggttcggttcccgtcagtgcctactctctacacagagatttcggactgccctcggaaggccattcaacaatcagcctcatacagacttccaccaacgtctgctctctggaatgatgcataaatgtttacttctcttcctcatcggttttgatgttattactttaccacatcaaactgctgttgtcaaccctgtttttaatttttaaagctgtggatcggcgccggaattcttccgccgcggtcaacaaatgcctgacaggagaactggtttaccggcatgatcggagcgtatcccagaaggcctccaaattcaacagtctctccgacgccttttccgattaccggaatcacacgtactgctgttgttttctggtttaccataccaatagcggcttcatctgcaatgattccggaaatggtagatgcttttgtatctccggggattgcgatcatatcaagtcctacagagcagacacaggtcattgcctcaagtttttccagagaaagagcgccaaggttgaccgcgtcgatcattccctggtcttcactgaccggaataaaagcgccgcttaaaccgcccactgctgtagatgccataactccgcctttttttacctggtcatttaaaagagcaagagccgctgtggttcccggagcgcctacacgctcaagtccgatctcttccagaatctctgcaacgctgtcgccaatagccggtgtgggcgcaagagaaagatccacgattccaaaaggtactcccagacgtctggatgcttcctgggctaccagctgtcccacacgggtaaccttaaatgcagttctcttgatcatttcacacagagtttcaaaatcctctccgcgaaccttctgaagggctgtttttacaacacccgggccgctgacgccaacattgatgatacagtctgcttctgttactccgtggaaagcacctgccatgaaaggattgtcatccggagcattgcagaataccaccagtttcgcgcagccaagggaatcctgctccttgcttgcctgcgctgtttccagcacgatctcgcccataagctttactgcattcatgttgattcctgtttttgtggaacctacgtttacagaactgcacacacgctctgtctctgccagagcctgagggattgagtggataagaagctcttctgccggagtcattcccttgcttacaagcgcagaatagcctccgataaaattaacgcctacagtcttggcagctctgtccagtgtttttgcaatggtcacaaagtcctggctggtatggcaggcagcgccgcctaccagcgcgatcggagtaacggaaatacgcttgttgacaatggggatcccatattctgtggcgattttatttcctgtttctacaagatcctttgcatattctgtgattttcttataaatattttcatttaccttatcaagatcgctgtcaatgcaatccagaaggctgattcccatagtgatggtacgaacgtcaaggttctcctgttcgatcatcttattggtctcatttacttcaaacatattaatcataagtaggtgtctccttaaattctgtgcattttgttgaaaatatcctcgtgctggcagtggatcactacgccaagctcatctcccagagctgtaagctcttctgcaagagccgcggtatctttctgacacgcgctggtatctgttaccatcatcatattaaaataaccctgaacaatagtctgtgtgatatcaaggatattcacctgatgctctgccagatatgtacatactctggcaatgatgcctactccgtcatttcctactactgtgataattgtttttttcatggctttgtcctttctatatggtaactgcttcggaaacaaaatcccgcttcgctacctgaattttaaaatcctttgatttataagggttgtctcccagtgttacctctgaacatacggtttcataggcaagctcttcataattgttttccctgcttaaatgtcccagaaaaacagctttcatattgtcatgaagaagcctgcagagaagccttcctgcattttcattggacagatgtcctctgtctcccagaatcctctgtttcagataataggggtattttcccacctgaagcatccggatatcatggttggcctccagaagaattgcatccagattctgaagattttcaataatatagtcattatattttccaaggtccgtagcaatgcccacagagctttccccacattccaggcgataacctaccggctgggccgcatcatgtggaatggtaaacggattgatccgcaaatccttgatctcaaatgcctgatcctcccggatttcccggaaaatcccctccggtatttttccaagggagccgcaccgaagcatggcgtctacggttcctcctgtagcataaataggaatgccgtattttctggcgatcactcccagacctttgatgtgatctgaatgctcgtgagtgatcagaataccgtcaatatcacggcctgtcagatccaggctgttcagaccctgttccatttttttgccgctgattcctatatctaccagaacatgggcgcattccgagcccacataaatacagttcccgctgcttccgctggctatactgcaaaatctcatagtttctttatcccttcatctatctgtctgtacgtctcgtccaaaaggccgttatttgtcaccacataatctgcatgtgaacgaaaataagcctctgacgcctgacttgcaataatgctctctgccttctggcggctgtagcctctgctttccataaggcgctgtatccgtatttcctgatcggtatggatataccagattttatggcagatcgtatcataatgatcttcaagaagaagcgcggcctccaccacaaaaagaccgcggccatttttctgctcttcctctattctctccagaataaaagccttaaccgccggatgaatgatctcattcagtctgcagcgcatttgctcattacagaatactacatccgataccgccttacggtcaatggtattatcattttttacaatattttttccaaataaactgatcacctgagcatagcagcgtccgccgggttccataacctgatgacctacctggtccgcctgtatgacacaggcagacaaatgcttttccatgtagttcaaaactgtgcttttgccggctcccacaccgccggtgataccaataatcttcatcgtctgatctgtcattttgcctcgtaccagctttcgccctgatgcatgtcgatctcaagctccacagcaagccgggcagctcctttcatttcctcttccagtattctggacactgcctccacctcatctttttttgtctcgatcagcagttcatcatgaacctgaagcaccagtctggactgaagtccttcccggagcattctttcatacacgcggttcatggcaattttaatgatatctgccgctgttccctgaatcggagaattcatagccacccgttccccgaaggatctctgcataaagtttcctgatttcagctccggaatgggccgcctcctgccaaacatggtagaaacatatcccttttcttttccttcatcaaccatccggtcgagaaaaactttaatgctggggtaggtctcaaaatatttctctatatattctgccgcttcttttcttgtaatacttaaatcctggctgagcccaaaggagctgatcccatatacaattccaaagtttaccgcctttgcatttcttctctgtaaatcggttacctcatcatagggaacatggaatacctgagaagcggtcagcctgtgaatatcctccgcctcacggtaagcctggatcagcttttcatccccggacatatgagccagcacacgaagctcgatctgagaatagtctgcgtcaaggaacacacacccgtcctcaggtacaaatacctttcggatcagtcttcccagctccatgcgaaccggaatattctgaatgttcggttctgtgctgctgatgcgtcctgtggcagtgatcgtctgattaaaagtagaatggatccttccgtcttcttcaattactgcgccaaggccgtctgcataggtggatttcagctttgtaagctgccgatattcaagaatatcatttacaacaggctgctccggagccagtttttccagaatatctgccgctgtggaatatccggtttttgtctttcttcctcccggaatccccattttttcaaaaagtattactccaagctgcttcggagagttaatattaaattcctctcccgccttttcgtagatcagcttttccagctcacggatccggacgctgagtctttcgccatatgctttcagttcctctccttttacgcagattccgcatttttccatggaatccagagtaaatacaagaggaagttcaatgtccgtataaacctgccacattcctgtttccttaagctctgcctctgttttctccctggcagcataggcagtaaacgcctgataacaggcacagattcccagattttcggaagatttttcccaggctttttcatacgtatcttttccaagaagctcttccctggatggaatactgattcctccgatatactctctggcaatgtcctcgtaagtataagaggatttcagaggattcagaagataagccccgattccaagatcaaatacccgttccggttccagagattccacgtgctttaaaagcattttaatatccatggcgctgatcactgtggcttctcccagttttctcagcttttcacaaagatattctcctgacagaagcccttctgcaggaatataatatacttcttctttttccagcgcaattccaaggccatatacattgtttttgtctgcaatcagcgcaattcctgccatagaattacgcgcagctttttcaaacagagcttccacgcccgaaagctcactgcacacaaagaaattctgctctatggtattttccggtaccgcctccgcgtcaaatctgcccagaagatttttaaactccagtcttctgcatagctcataggcctgctgtgtataaagatttccaaggcgcgcctcttcataagagtattcaagagggctttctgtattgatggttgccagagttttgcttaaaacagccagatcgtagtgttctctcatcgattctttggccttattgggttttatttcttccaggtgctcatgggcgttttctattgagccaaactgggcaatgatctttgtggcagttttttcgcccacacccggaatccccgggatattgtctgaagaatcccccatcagcgccttcagttcaatgatctgaggcggcgttacctgatatttttccagtacctctgccgtgtgaaaattctctatggtggttttgccctttgaggtttttggaaggcggatcatcactttatccgtagcaagctgaagaagatccctgtcaccggataaaattgttacctccatgcccttctgttcactttttctggcaagggttcccaaaaggtcatctgcctcatagcctggcatggaaacagtttttacccccatggcagtgagcatttctctcatcagaggaacctgctctaccagctccggcggcattcccttcctggtacccttgtacgcatcataaagcttatgtctgaatgtaggctcatgcaggtcaaatgccactgtcagataatccggcttttcttcttccagtatacgaaacataatattcagaaacccgtacactgctcccgtatgttttccctctgaatttgtcagatcgggaagtccgtaaaaggcacggtttaaaatgctgtgcccgtcgatcagtaaaattttttcactcaaactgctgtcctcctgagattgtctttttaccagaaatgttttatttcaaaaaatatgaaaataaagaatacaaccagcactacggtcagaatcactgtaaggattcctccggcaaactgtattccccttctcttatggatatttcttctggccctgcggatatcctgttccagaagcttctgaaaatccagtacagaaccgtcctcctgttcatccagctgctgggttactttgttgactataaaataagtctccagctcgtcataacaggaagggcagtgttcaatatgatccagaaattcttccatttcatctgttttcagggtatggttcatgtaccgcgccaccatactttctgcagtacggcagtccagctcagatatctgtcctcttctgatcatctaaaatccctcctgtccgcttctgatatcataccataaaaaaaggtgattctcaacgcatttcgctggaatcaccttcttctcttggtattattattctgttatttcaggtattatggtctgtgtattttccggagcagcatttgtttccacagcaggaacaggggtgttcagaatctgcataaattcctctccggtaatggtttcatgctcatacagatactgggccagctcgtggagctttccaatattgtcctgaagaatcttcagagccttatcatgctgagtctttacaagctctaccacttttttatcgattagtgtctgggtctcaaaggagcaggcaagggttgcgtctccgccaagatactggttgcttacattctgcatggcaaccatatcaaaatcctcgctcatcccaaactgggagatcatgcctcttgcaatttttgtggcctgttcaatatcattggaagcgcctgtggtaatggaatggaaaatcagctcctctgcagcacgtccgccggtaaatgtggcgatcttattttccagctcctcctttgacatcagaaagtgttccttttcatctacctgcatggtatatccaagggcccctgaagtacgtggaataattgtaatcttatggacaggcgcagactctgtctgttttgccgccacaagagcatgaccaatctcatgataagaaacaatcagcttttccttattggaaagcacacggtttttcttctgatatccggcaatgacaacctcaatactctcctcaaaatctgcctgagtggcaaacttacgtccgtcccggacagcacgaagagccgcctcattgacaatgtttgcaagctctgcgccggaagcgccggcagcagcctttgcgatctcgtcaaaacggaccgtatctgcaattttaatctttttcgcatgaaccttaagaatctcttctcttccctgaagatcaggaagctccaccgggattcttctgtcaaaacgccccggacggagaagagccgggtcaagagaatccggtctgttggttgcagccagaatcaccacacctttagaaccgtcaaagccatccatctctgtgagaagctggttaagagtctgctcacgctcatcatttccgcccgaaaaacctgcaccgtcacgttttttaccaatggtatcaatctcatcgataaatacaatacagggagccttttcattggcctgcttaaatagatcgcggaccttggccgcacccatacctacaaacatttccacaaactcagaaccggaaatagaaaagaacggaacctccgcctctcctgcaactgcttttgcaagaagagtctttcctgttccaggagggcctacaagaagagcgcctttgggcatagatgcgccaatttccgtatatttctgaggattgtgcagataatccacgatttctgtcagcagctcctttgcctcatcctctcctgcaacatcagaaaacttgattccagtagaagattttacatataccttggcattactttttccaaaggacatagctcctccaggaccgccgtttcccatggaagacatcattttcctgctgagccagcgtcccaggaaaataaaaatcccaataggaatcacatagcttaagatcagagtaaagaaaatggacgggctttccggaagtacttcatccattacaacgtctgcatccaacagacggtttacaagatccggatcatccatctgaacagtcttgcaggtcagtgtatttcctgttttcggagattttacctcataataaatgtagccctcttcaatagtcgcccgggttacattgcccttttccacacttttaataaaagtggaataatctgttttttcgatacttctttcctgaatcgccggtacaaccagaatgttcagaagaacgataataacacctacaataatataatatacataaagaggtctcttggtaggcgttttaccaggttttttgtcgcctaaattcatatattgtctatcctccatccccgttacatcatatcggaatcacttatcagtatctcccaatatgtgcaaagttatttacctgatgtaacataccaccttttccgtctgatttcaatgtacttcctgtgaaatattattaatttttcataaaaagagtttgggatgtgcaggatagcctctgcaaactgcttttccggtatttaactgccaatctgccgtttatgttgctgtccactccgtttataccaccccgggtaaccggtgtgtcatttaaaggacctcatttaaaggacggcatctttaaaatttttcttgcagaattctgtcttttgtgttaatataattatcggttcatgtgccgctgtggcggaattggcagacgcacttgactcaaaatcaagcgggtaacaccgtgccggttcgagtccggccagcggcatttgataaaaagagaacgtatatttcattttcgaaatgtacgttctctttttcgttgattctgtactgaaacagtttcaatcctcaccacagcagcaatcttgttattacagcaatggcttcctctgttttcagaagcttattttttcatgactgtttttcttccaaacacaaaactggatttttcttcctgtccccatctgtttcccttcagattcccagggcaatctccatcatctgcgaaaaggaagtctgtctctcctgagcagaaagcgcctcctttttaaaaatatgatcggaaatcgtcagaatacccagagctttctttcctgctcttgcagcattcatataaagagccgcgcattccatttccgtacataatacccccatgcttctccatgccggagcagcagccggatcttcattataaaacagatctgaggacagcacgtttcccacatggacaggaatctttaattcatgtgctttttttactgctttatccagaagcccgtagtctgccgtaggcgcaaaagttcccggaaggcagtactgatgagcataggaggaatctgtacaggcgccaatagccagaaccacatctcttacattcacatgatcctgaagggctcctgcggacccaatgcgaatgatctcatctacatcataaaaatgaaacagctcatagctgtaaatacccatggaaggcattcccattccggctcccataacagaaatctcctgtccatgataagttcctgtatagcccagcatgtttctcactgtattaaagcagaccggagcttccaaataagtttctgcaatatattttgcccgcaaaggatctcccggcatcagaactctcctggcaatatctcctttttgcgcggcattatgcggtgttggtatactcatagctatccctccttttttatataaatcatatgcttattttcggtggtcttcccggatcagctgccggatcgcccggattccgactctcacagccatatccgtgtcataaatcagaggattatccattcccctctttgccctctcctgatttcccagagccagaaaagctgctccgcagcgaaccctaagataatttgcaactataaaaagcgcagctgattccatttctgaggcaaggcatcccagccgcagccatgcctcccatttgttctgcagctcataactgacaggctttatctccggagaatgttgtccgtaaaaagaatccttactctgtaccacccctgtgtgaaacgtacagccaagctcttttgcagcagaggccagcgcatttgtcacataaaaatccggtactgccggaaattcaatgggcgcatattctttgctggttccttccatacgtacagctccggtagcgactacaatatcgccgcctttgactgtcaactccattccgccgcaggtacctactctgataaaagtatctgctccgcactccaccagttcctccattgcaatggcagcagaaggccctccgattccggtggaagtaacgctgactttttctccgtccagatatcccgtataagtaacaaactctctgttatctgcgatcaaaaccggatcatcaaaatacttcgctatggaagcgcaacgtcccggatctcccggcaggatcacataccttccgatttctcctgcagccacctggatatggtaggcttttccatctgttgaatataccataaaatccctccttacttatatccggcagtttgctctttttattctgtccaaaacttcgttttttcaaaacaaaaaaagctgccagaaagcaaaagaagacctggcatctgcccggtctccctttatttttatttcagtctgtctgcatcttcgagaagcttttcataaatcggaaagcagtcgaaggtggcaaaataatcctttgcagtttctgctcttcggatcatctcaaagcttccgtcctcatgaagaagaatttctgctgatttcagttttccgttataattatagcccattgcaaaaccgtgagcaccggtatcgtggatcacaagaaggtctcccttgtccacctgcggcagatatcggtcaatggcaaatttgtcattattctcgcagagtgatcctgtcacatcataaagatggtcacagggctgatcctccttgcccataaccgtaatgtgatgataggctccgtacatggcaggacgcatcaggtttaccgcacaggcatccactccgatatactccttatgagtgtgtttttcgtggattgcttttgtaacaaggcagccgtaaggtcccatcataaaacggcccagctccgtataaatagcaacatctcccattcctgccggaacaagaacctcttcatagactttacgcacaccctctccgatcacgcggatatcattcggcttctgatccgggctgtatggaataccgataccgccggaaagattaataaaactgatgtgcgcgccggtttccttctgaagcttcactgcaagctcaaacataacctttgcaagcattgggtaatactcatttgttacagtattgctggcaagaaacgcatgaataccaaaattctccgcgcctttttctttcagaatacggaatgcctcaaaaatctgatctgttgtcattccatacttggaatccccgggattatccataatatcattgctgatcttgaacacaccgcccggattgtaacgacagctgatggtttttggaattcttcctgcagcacgctccacagcatcaatgtgagtgatatcgtccaagttgataattccgccaatctcatccgcataacgaaactcctcttccggtgtgtcattggaagaaaacatgatatctccttccctgcagccaagagcctttgccatcataagctctgtcatggaagaacagtcgcagccacagccatactcctgaagaatctggatcagatatggattgggagttgcttttaccgcaaaaaactccttaaatcctttgttccagccaaaggcttccttcagcgcctttgcattttcgcggattcctttttcatcataaagatgaaaaggtgtgggaaactgctcttcaatttcttttaatttttccagcgtaacaaatggtctttttttcataataattaactcctcgtttgtctcttaaatatctcctcgtttgtttacttcacatgctgatgagtaaacagatgatcctgacagtattcatagtttccattgcatttggaacagaaccggaattcaagattcggatcatctaattctgtacgtccgcagatcgcacatttatgttttgccgcgcttcctgtagaaggattcacacgactctgggccatagccttctgaaattctctccgtctcttcacttccttcggattataccggctgccgctaagagcagtaaagaaaaacaggataaagttcaggaaagaagcaatgatcggcacagtcataacccaggctcccactctgacataagtgataatgttatacaggataatcgctccgtacacccatcccatccacttcatcttaatggggatcacgaaccacagaaggatctgcatgttcggatagcaggcagcataggcaagaaatacagacatgctgacataataagtggtaaatacaccgcctaccagatacattctccctgtaataaagtaggtcagaaatgaagctgcaagtacaaataaaagtcctgaaaaaatatacaggttatagcggaacgttccccaagtacgctccagagaacttcctatgggataatagaaaaagaaaatggaaattgcaaacaacaggaagtttcctgtctgcggcgggtagatcacccaggttacaagtctccatatctgtcctttcaggatcatggccggttccaggctgagcatactcagcataccgggattaatatacatcaaaagatatcccagcacatagcaaatcaccatatacatagtaaggttcggaattccgtatcttccatactttcgttccagtttatcaatccaattcataaactcactcaatctccttttttattcattgaccgcgctttaaaaatatttcttttttgacagcacaattgcggcgatcacactgagtgctatggatatcagaataacgatcaggaatccccactgagtgccggagaacggcattccggcagcgttaagattcatgccgtaagcactgaaaataatcgtaggaatactcattacgattgtgatcacagataatatcttcatcacatcgttcaggttgtttgaaataacagaggcaaatgcatccatcatgcttctcagaatgccgctgtaaatattggccatttcaatcgcctgagtattttcgatgataacatcctccagaagctccgtatcctccggatattttttaatactctccaccttgatcagcttctccagcactgcttcattagaacgcagagaagtggtaaagtataccagtgatttttccagttccagaagttcgatcagttcctgatttctgggagaaagatgaagcttttcctccacctgttcactttttttatctataatacgaagataacgcaggtacatactggcattgcggtacagtatctgcaggataaaacgtgttttcatataggtaaaaaagtttcttacacggccttccataaatcttgtaagaacctgtgtatcctccagacaaatggtaaaaatcattttatctgttactataataccgagagggatggtgccgtaccagtccttatcatttctctcctcgatcataggcacgtcaaccagaatcagcgtgtaatcatcttccacttcaatacgggaacgctcttcctcatccagaggggctctgagatcgtctacttcaatctgaaactgctccgaaatctcaaaaatctccgttgctgtaggattcgtaagagcgatccagcagccatcctgcggttcctgtatttcatgaatagcaccttcagatgtccgaaacattctaatcacgattcttttcccctttccactctcttttttccattcagaccatctggtctgaaagtccctcatatataaaaatacagtatacattataagttgtgaacggttctttgtcaattcataagacttttcattaacaggaaatttacaatttgaaaaaatctgaatttcgtacataagaaagtacatttttgtgcttatcgcaaacttgttcttacattatctttatgatataattaattccagaaatccggcagcgcagctgccatcgtcattcgggtaaaaacagtcaggcgccgtaaaatcgtatgtttttactggtatgatataaaatctccgtatgacaccccccggaagggctgccatacataaaaacaggaggcaacaaaatggaaaataaaaaatatgtggcgtatgtgggaacctatactcacggctccagcaaggggcttcaggtttatgatgtagatgtggaaaaaggaactctcacagaacggagcgaagtagaagtaaggaattcttctcacacagccctctccaagaacggtctttttctctattctattgaagatgaaggtgttgctgtattcagacgcgacaaagacggtgatctggagagaatcaacagcgtagatatcgatggaatgagaggctgtttcctttccacggatgtagacggcaaatatctttatgtggcaggctaccacgacggaaaggtaactgtggtacatactcatcaggacggccgcttaggcagtcttatggacggagtttttcacaaaggtctgggcagcgtagctgaacgtaatttccgccctcatgtaaactgtgtccgtcccacgccggacaacaaatatctctgcgcagtagacaacggaatcgatcaggtaaaagtctaccgcatcaacaaaagacgccataaactggagcttgtggacattctacgctgtcccagggaaagcggtcccagaatcatccgcttcagtgaagacggacgattcgcctatatcctttttgagctgagcaatgaggttaaagtgtacagctatgacggcagcggtctgactccggagtttgagcttctccagagtgtttccactttaagcaaagaacacgatcaggattctttccacaatgccgcttccggacttgcgctggcccctgacggaaaacatcttttctgtacaacggcaggagaaaacacggtttccatgtatgaaatcgatcaggaaacaggctttctggaaaagaaattcacccttcctatcagtggtgattatcccaaggatctggtaatcttcccagacaaccgtcatattgccattgccaatcacgcaagcaataccatcacagtatttaccgttgattatgaaaaaaatattattgtcatgaacgacagacctcataaaattgaaacccctaacagtatccatatctgggcagttccggaggaacagtaaaacatagctcattcatccccgtttgcttttgcagacggggatattttatgccccggatatatatgtttaagctttttaatgttgcctgcaagtggaatcatcatctctgaaaaaccttgatttttacaggaaataaaaaaagaccctgacctgcagaaatcacgccccaaaaggcaaacctctgcaagatcaaggcctttatcttatactgtctgatttgacagccttttattactctgcttggacacacaatgcacgatcagctcatgcattgccacaggattcttccccgtgaagcgtctgccggaagccgacagaattcttcagaaaatcatcccatgtatacacaggataaagccatttcccaggatacgggctttgccccaaaacaggatatatggctttgccctgtgacaaatttatcttacgcgttcttctcagcgatagctgcctgagctgctgccagacgagcgatcggtacacggaacggtgagcaggatacatagttcaggccgatcttatggcagaactctacggaagacggatctccgccgtgctcgccgcagatacctacgtgaaggttcgggttaaccggttttccaagtttaatggacatttccataagcttgccaacaccgatctggtcgagttttgcgaatggatcgttctcgaagatcttagcgtcatagtatgcatccaggaacttaccagcgtcatcacgggagaatccgtatgtcatctgtgtaaggtcgtttgtaccgaagcagaagaagtcagcctctttagcgatctcgtctgcagtaagagctgctctcgggatctcaatcattgtaccaacttcgtatttcagatcaacgcctgctgctgcgatctcagcgtctgctgtctcaacaacaaatttcttaacatatttaagctctttgatgtcgcctacaagcggaatcatgatctctgggcatacattccagtcagcgtgtgctttcttaacattgatagctgcacggataactgcttttgtctgcatcttagcgatttccggataagtaaccgcaagacggcatccacgatgacccatcattgggttgaactcatggagagaatcaatgatagtcttgatctgctcaacagttttgccctgagcgtcagcaagtttcttaatatcttcctctgtagtaggaacgaactcatgaagcggcggatccaggaaacggatagtaaccgggttgccttccagagcctcatacagcttctcgaagtctccctgctgctccggaaggatcttctcaagagctgcttctctctcttctactgtctcagagcagatcatctcacggaaagcgtcaattctgtcgccctcgaagaacatatgctctgtacggcaaagaccgataccttctgcgccaagctcacgagcttttttagcgtcagccggagtatcagcgtttgtacgaaccttgagtgttctgtatttgtcagcccatcccatgattcttccgaactcaccagcgattgtagcgtctacagtcgggatgattccgtcgtagatgttacctgtggaaccgtcaagggagatgctgtctccttcgtggaactctttgccggcaagtgtaaatttcttattctcttcatccatagcgatctcgccgcatccggatacacagcaagtacccataccacgagcaacaactgctgcgtgagatgtcataccgccacgaactgtcaggataccctgagcagatttcataccggtgatgtcttccggagaagtctcaagacgaacaagaacaactttctcgcctcttgcagcccactctacagcatcgtctgctgtgaagacgatcttaccgcaagcagctcccggagaagcgccaagtgcttttgccattggagtagcctctttcagagccttagcgtcgaactgcggatgaagcagtgtgtcgaggttacgaggatcgatcattgctacagcttcttcttctgttctcattccctcgtcaacaaggtcacaagcgatcttcagagcagcctgagcagttctcttaccgttacgtgtctgaagcatatacagtttaccatgctctacagtaaactccatatcctgcatatctctgtagtgtttctcaagagtattgcatacattcttgaactctacgaatgcttccgggaatttctcttccatctcggagatgtgcattggtgtacgaacaccggcaacaacgtcctcaccctgagcatttgtaaggaactcaccgaacagaccgttctcacctgtagcagggtcacgtgtgaaggcaacacctgtaccacagtcatcgcccatgttaccgaatgccatcatctgtacgtttacagcagtaccccaggaatatgggatatcgttgtcacgacgatatacgtttgctctcgggttgtcccaggaacggaatacagctttgatagctcccattaactgctccttcggatcagacgggaaatcagcgccgattttttctttatattcagccttaaactgattagcaagagtttcaagatcttcagctgtaagctcaacgtcctgagttacgcccttctcttctttcattttgtcaatcagctcttcaaaatatttcttgccaacttccataactacgtcagagtacatctggatgaatcttctgtagcagtcccaagcccaacgtgggttgttggatttttcagctaaagtatgaacaacttcttcatttaaaccaaggttcaggatagtatccatcatacctggcatagatgctcttgcaccagaacgaacggaaacaagcagaggattttctttgtcaccgaatttctttccggtaactccttccattttggtgattgcttccatgatctgagccatgatctcatcgttgatctgtcttccgtcttcatagtactgtgtgcaggcttctgttgtgattgtgaagccctgcggtacaggaagacccaggcttgtcatttcagcaaggttggcacctttaccacccagaaggtttctcatagtagcgttaccttctgtaaacatgtaaacccattttgccattttacattttcctcctaaatttttgttctttaaacataaaaatatgtttttatacgcacatagttattgtatagatttcttcccaaatagtcaaggacaaactcaaaaaaagggggaaaaactattatttccccccttgcgctcgtatcatgtcagcgttttttcttcatattcagtacaagatgtcttggaagaccgttcaccatgatcggctgataatctccctggatcagcggtttgatataatcaataaagtcctctgtcacgtaagagccgtctcttgtcatccagtttcttggaaccagtttttcctcattggcaatgcggtgcacatcataaatacctgtttttgccatatacggatcatcggaaacacggtcgatgaccaccatttttccggtatctccttcgtcagcagcctttactgcagcgccgcccaccataaacgcctcgtcaatatctgtccgggaagccatatgggatgcgcttctctgaagtgtggagaactctacggctctagttttgcagccgcactctcctgccaggaagtttgccagatacgcagcagttccctgaagctgtttatgtccgaagttgtccacgtaatcgctggagcttcccagctcgcagacataacgcccgtcagccaacttgattccttcagacaccgcaatgacaacagaatcctttttcgtcagcagatctttgacctttgccaggaacttctccacatcaaaaggaatttccggaagataaataagatccgggccttcgcagtcctctgtttttgcaagagcagccgccccggtaagccagccagcgtttcgacccatgatctccataatggtgatcatctttttcttgtaggtcagaccttccgcatcgcggatcacctcttttgtggaggctcctatgtattttgctgcgctgccaaatcccggagtatggtctgtgagagccagatcattgtcaattgtttttggcacaccgataaatttctgcttctgtccggtaagaatggcataatccgacagctttttaatggtatccatggaatcattaccgccaatataaataaacgtatcaatactcagcttattcagaattccaaacagtttctcataaatatctctgtcttcatgtatttccggaagcttgtaacggcaggaaccaagaaatgcagacggtgttcttttcagaagctcaatatccagttccgaatgaatctgtgtagacagatccacatactgctcatccagaagtccctgtactccgtgaagcattccgtataccttgtcaaagcctcgttcaatggcatttttataaacgcctgccagactggaattaattacagaggtgggtccccctgactgtcctacgatgatgtttcttttttttgccatattctgttcctcctgtacaacaacctataattgttaattttaacaatatatattcattccgtcaagtttatattatatattttgcatataatattgtttgatttcaaattatgcatagtcaaaatatacatcttcgcaggaaacaaaaagcagggcagtatcccaaagaataccgccccggttgttgacatcatgtcctgttattttttattaaaatgtaaacttgtctgcaaagtaagcgtccagctcgtcgattttcacgcgaacctgctccatggtatcacggtcgcggacagttactgcgccgtctgtctcggaatcaaagtcataggttacacagaacggagttccgatctcatcctgtcttctgtaacgctttccgatatttccacggtcgtcatactcgcagttgtattttttagaaagctgctgatagatcttctcagcgccttcattcagcttcttggaaagaggaagcacaccaatctttaccggagcaagcaccggatggaaacggagcacagtacgcacatcatttttctcagcgtcaagaacctcttcatcatatgcgctgcacaggaatgcaagcaccatacggtcagctcccagtgacggctcaatcacatacggaatatatttctgcttcttctcgtcgtcaaagtaagtcagatcctgaccagaaacattctgatgctgtgtcaggtcatagtctgttctgtcagcaataccccacagttccccccagccaaacgggaacaggaactccacgtctgtggtagctttgctgtagaagctcagctcttcctgatcgtggtcgcgataacgtacctcatcctctttaagacccagagaactgagccagtcaaggcagaactgcttccagtatgcaaaccattcaaggtctgtatccggctcacagaaaaattccagctccatctgctcaaactcacgggtacggaaggtaaagtttccaggagtgatctcattacggaaagatttaccgatctgtccgattccaaatggaattttctttctggaggttctctgtacattcttaaagtttacgaaaataccctgcgcggtttccggacgaaggtatacggtattttttgcatcctcagttacaccctggaaggtcttgaacatcaggttaaactgacggatgtctgtaaagttatgtttgccgcagcttgggcagggaacctgatgctctttgataaattccatcatctgttcctgagaccaggaatctacgcttccttcaatctcgatcccatgctctgcacagtagtcctcgatcagcttatctgcacggaaacgctcatggcactccttacagtccatcagaggatcagaaaatccgcccaggtgaccggaagctacccatgtctgaggattcataagaatcgcacagtctacgcctacattgtagggagactcctgaataaatttctgccaccacgctctttttacgttgtttttcagctccacacccaagtttccatagtcccaggtatttgccagaccaccgtaaatctcagagcccggatagacgaatcctctggcttttgccagagcaacaattttttccattgttttttccataattattctcctaaatttttcaatgttcttaactgcctggtctcccctgcagttatcaatgctctcattatactagcatccttctgctttttcaacagatttccacccatttttcttccggataatccactacaacgcagtcattgtgataagtccgttccggaagaacgatcatcacatgagccagctctttatttacaggaatcgcgcttaaatgccatactcctgtatgaagaagcaccatagttccctttggcacaagaaaagcttctgtcagttccggtacaggctcctttccggcaggcgccacatggacgatcacatcatcatccagacagagtacgccttcctgggtgtagttgtgatattctgctgctgagacgatcattttttccggtttatgtatcagaagcggcgaaaaagtcatctgcatgcttcctgaactgtgcattctcagtctgtcctgataaaaatctcccaggctgtagccttcagggttcataaaatctgtaaaacttccaaattctttaaaactttctgctgtaagtgtttttaccttgatctgcttcataaaaatccctcccgctgatttttctttatagtttttgcttttatttcatgatttccagaatttccagactcttaaatttccggtctgtgtttctgtcaacatatctgtgaatgatccgctccagctctgccaagacctcttcactgactgtaaaggtgtaaagctttcccattggcgcgctgacaatgtagcgcatggcataaagagccgccccggagatccttactgcacccctctgaccttttgcgcaggaaccgcacagaataccgtgatgctcctgagaaaaaaaacagtcgttttccggaacctcatctctggcacagcaggcgcaggaagcaagctcaggacagtacccttcctcagccatggcccgcagttcaaacacacagcggatcagggaatcctttacatgaggattcagaagggcttttactgtcacatagagaagattcatcatttctctttcgtctgttccttcctgcccgaaataatctgccagctccagaaaataatacccataataaattcccggctgcatggccgccagttccataaaatgatgagttacatttacctgattcaggttatagctgcttcttccctcataaagagtaaagcttccgaacacaaaaggctctgctgctgccataaaagggctgttcagccttctggctcctctgacaaaggcagaaatcttgcctctttctcttgtaaggagcacgatccttttgtcgtactccccgatgggcatggcagatatcacaacaccctgcacagtaatcaggtcactcatgatcagatttcctttttatcatatccaaagtttttgatcagaaaatcactgtcccgccagtcttttttcaccttgacccaaagcttcaggttcacctttgcatccagcatccgctccagctcaaatcttgcgttgcttccgatttttttcagcatgcttccctgctttccgataataattcccttgtgggaatccctctcgcagatgatcgttgcgtcaatatccaccagacggccttttcccggacgttccttcatacggtcaatagccactgcaattccatgagggatctccgcatccagggcgtgaagtgctttttcacggatgatctccgcagcgatctgtctctgaggctggtctgtcaccgtatcctcgtcgtagaacatggggccgtaaggcagatacttgagaatacttgggatgatatcctctgtattcactccgcgcagcgcagaaacaggaatgatctcatcaaaatgataaagcttccggtaggtatcaatagcctttgcgatctcctcccggtcaacggtatccaccttgttgatgatcaaaagcaccggaagatgaaggcttcccagctgctccgcaatatgacgctctcctgctccgataaaggtggttggctctaccagccagaggatcacatccacatccttcagagtacgctctgccacctggaccatgtactctcccagcttgttttttgccttgtggattcccggagtatccagaaatacaatctgtccgtcctcacaggtataaacagtctggatcctgtttctggtggtctgaggttttttggatgttatagcgatcttctggccgatcagatgattcatcagagtggatttccccacattgggacggccgataatagctgcaaagcctgatttaaaattttctttcatataaaaattgtccctgctttcttctgtacttgtcagcaggaaatcagagattttacctctttaaagatttcccgttctttttcaatggctgtttcacttccgacaacacataccgcatcatcggaaaggatcgcttcgatcagtggagcaagtccgcggatatcctctacgtctgcgccaaggatctgatttctctctttctgcatcatttcctctgtaacgccgcagaaccaggcagttttggaaatacttccctgcatctgaggtgttctgggaacatcctttccgcttatggtaccgataatatattttgtcatttcccgctcatctgcctggaaatcacggacataagccggaattccctcataaacatccagggtacgtttcagatggggatctctgtaggaaacaaaatagctttccccgcttctcttaaagccgctcatacatccataagctccgccttttacacgaaggttcatccagagataatcatagcttaaaatcactttcagaatatccagagctcctgtgtattcatagccttttttgcggaagtttccggtacgggctacatactgaacctgtccggatgtggtaaatccctcgtttttcttttcacagcttatggatttttctgcgatgtcaacaaattctgtatgaaacgtatgcttcagagccttcacctgcttcatgatctcatccagagactccctttctcctgtataactgatcttcagatattccggccggagaatttccgtcataagagaattcagctcttttacaagctcctcttttctggtgtcaaaattcttttccagctcctcgataaactgataataggcaataccggacattccctcctggaaagccgccataggcgagctgtaggaagcgccccgaagaaccgctgtgcagtgtcctgcgcttaccagatttgcctgggctctggattttactcttgcaatgatctcatagagacgcttggtatcctccaggctggaagtattcaggatctctctgatcatacggaacagaacgtcaattttcggatacatcacctttcctcttacagagaacatggcgtcatagtcctctgtagagtccacatgatcaaacacctctattccaatgttgataccgccggtctcggcattgatctcattggacagctctccgtaagtataatgagcagtgtctacatatccaagaacagacttcagaagacccagatatgggactttttccggcgcaaggtctttcagatcaaacatcagatcaagatatgcaattccgttggtgggcacctcatgataaaggaacaggcttccgtccacatccagaggctcattggaaaatcctgctgcttctttgcggatgtcctctcttttcagcatgggaatacatttttctgctcccggctcctcaggtgcctcctgataggcctccagagcttttgttttctgtacaagcgcctctttttcctcctgagaaagactttccagatgagcctgaagcttctcttccagagctttttccttacgggcagcaagacctttggagggtacaagagtgatcacagaaccatgggtattgtccagcagatattttcggatcagctcctcaaaatatccctgtcctgccagctccttcagcttttcaaacacagggagagcctgaacctgggcaaaagctttttcatcactgtacagccagtttccaaacactgccagactgtacatcagtcccttgggccaggaagaaaaatcagcctctctgtatcggaattccatacagttgatacctgcatccagagcttttctgtcaattccattggctgcgatatcttcaagagtggtacggatgatctctacaaacttttcttttttgtccgggtctgttccctttgccacaatgtcaaaataaggctgcatgattccgtcatcataggagccataaacgtccataccgatctgagcgtccagaagagcctgtttcaatggggcgcccggcgcgcttaaaagcgcataatccagaacttcaaaggcagttcctgtaagaacatcagaagcgtctcccactacggtgctgtaggcaagataggaatttccctcttcgctctcgctttctgaaaccggatattccataaccaaatcctttcttttttcaaaaggctcctgtctcctgatctcagaatccacatccagccgctcaaaagcagaaagataatgttcgtcaataaacgccagcttttctgccatatccatatttccgtacagataaatgtagctgttggaaggatgataataggtcttatgaaactccagaaattcctcataggaaagctccggaatatgatccggatcaccgccggattcacagccatagggggtatccggaaacagagaattcatgatttctctttccagaacttcatccggagaggaaaaagctcctttcatttcattgtagacaactccgttatatttcagggggccctccacgttttcaagctgatagctccagccctcctggcggaaaatctcttcttttttgtaaatattcggatagaaaacagcgtccagatacacatgcatcagattctggaagtcctgatcgttgcagcttgcaacaggatagcaggtcttgtccggataggtcattgcattgagaaatgtgttaagagagccctttaccagctccacaaaaggatcttttaacggaaattccctggaaccgcacagtacgctgtgctccagaatgtgggcaacgccggtgctgttttttggcggtgtacgaaatgcaatattaaataccttgttctcatcatcattctctatgagcataactcttgcgcctgtttttttatggcgtaaaagatatcctgtggaacggatatccttcagattttcttctttgataatgtcataagcaaaaattctgtccttattcatagttgcctccggtttttattattcattattgctcttttaaggctgattattccggcaatcctccttctcccggaaactgcagttcatacatttcacgggcggcttttgtaagaagctcaagctccttctccatactgatatccttcggaaggcatactgctgttttgtagatatccttctgaagctttgcctttgcatcatcctccttgatggtaatgatcccgcacagcatggaattataagagcggtctgttttacaaagatccatataaagctttatcaggtgacagcattctctgtaaagaagttccttatgaagctcacttttattgagaaactctgtatattttacagaatccagttcctttctgatctccttctgggcgctttttactccaaaccatctgctgcctgcatttttattaaattccatagacatccagaatttcagatagccgtctgccacatttgttccgtcatccttatagcgggcttcccagatttcccggcggatcccatttgcctccatatcctcaccggatgcaagagcctgctccagaagcgcctttctcttccggggatctgcctctctgtagtattctgcgattgtgggtgtatccatagtaattttctcctttgatcctgtggttttattcattttcattacagtatacaagctctgtctctgccagactcagcgcttcttcgatcactctgtccatatccatgtagcggtacatgccaagccttccgccaaaaatcacatttttttcttccagagccctgcgctcatatttggcatacagctcattgtttgcaggatcgttgaccggataataaggttctgcgccttttgtccattccgcagaatactcccgggtgatcactgtttttggctgcgtaccgaactcaaaatgtttgtgctcaatgatccttgtataaggaacctcataatcggtataatttaccactgcatttccctgataattagccatatccagcacttctgtctcaaacctgagagaacgataatccagagggccgtagcagtaatcataaaactcatccagcatacctgtaaacaccactttttctgcctgagcgcaaagctcctctttatttgcaaaaaagtctgttttcaggataacctgggttccttcaagaagcttccggataatttctgtatatccgccttttgggattccctgataaggatccttaaagtaattgttgtcataggtatagcgaagaggaagacgcttgataataaatgcaggaagttccctgcactctcttccccactgttttctggtgtagccttcgatcagcttttcgtatacatcctgtcccaccagagcaagcgcctgttcctccagattcctggggtttgtaatatgcattctggaaatctgttcccggattttcgcctcagcttccgccggagtgcgcactccccacagctgatggaaagtattcatattaaagggaagattgtaaagctcgtccttatagacagcaatgggagaattcacaaaatggttaaattctgcaaactgattcacataatcccacacggttttattggatgtgtgaaaaatatgggcgccatatttgtgaacctggatcccctcaatctcttctgtataaatatttccgccaatgtgatcccgcttatctatcacaaggcaggttttgccgcatttcacagcctcatgggcaaacacagagccgaaaagccctgctcctacgatcaggtaatcatattttttcatgaaaaaaccctctttcttctgagtcattataccctatagtataacaaatcaggaagaaaaagggtagtcctgttttatgacagtcttgttttgaaatcctggtatccgaatcttctgatcagccggaaatccccgggattttcttccagaacaatatccggaagcgccattccgttaaaggtattattttttaccatggaataaatggccatatcaccgaattccagaatatcgccgcattttaatttccagtcaaaggaataatctccgatcacgtctcccgccagacaggtagggcctcccagacggaaggtaaaggctttttctcccggcagaccggagtccttgagagggggacggtaaggcatttccagaacgtccggcatatggcaggctgcagaggtatccaaaatggcaatggacagctcgttttccataacctccagtacttctgtcaaaaggattcccgcattcagggcaacggcctccccgggctccagataaacctgaaccccataggtgtcctgcacatggcggatacattttttcagaagctctctgtcataatcctctctggtaatgtgatggcctccgccgaaattaatccatttcatccggtgcatgtaagggccgaactgctcttccaccgctttcagggtgtcagaaagggcatcggaattctgttcgcacagggtatgaaaatgaagcccctcaattccatccagtaattcttctgtaatctgatcgatggcagttccaagcctggatcccggcgcacagggatcgtatatctcatgtccctcctgggtggaaaagcggggattgatccgaagccccgggcttttgcctcctgcaaggatctgatccttatatttttttacctgagccggtgaattcaggataatgtgatcgcagagacggatgatctccggcatttcctcttctctgtacgcaggcgaaaaaatatggttttcttttcccagctcctctgccgccagtcttgcttcaaaaagcccgctggcagcagcgccgttgagatattttccgatcagagggtatacggcaaacatggaaaaggctttctgggcaagaagaatccggcacccggtctcctgacagatttcccttaaaatctcaagatttttaatcagcttttctttttggatcacataacagggcgttctcagttcctctcttttcattttgccaaaacaacctctctgtcattaatctaccagatccgggttttctttgatcttccacggaagtccccatttattcagggcatccataaacggatccggatcaaactcttcaatgttaaatacgccaggtccctgccaggttcctgtcatcagcatcatggttccgatcattgccggaacaccggtggtataagcaactgcctgagagcccacttccttatagcactcctgatgatcgcaggtattgtaaatgtaaattgtcttttctacgccgtcttttttacctgtaaaaatacagccgatgtttgttttgccctttgttctcggaccaagagaagaaggatccggaagcactgcctttaagaactgaagcggtatgatttcttttccctcatacatgatcggctcaatagaagtcattcccacgttttctaggcagcggagatgtgtgagatagctttctccgaaggtcataaagaagcggattcttttgattcccggaatgttaagagccagagactcaatttcctcgtgatgaagaaggtacatgtctttttcgccgatctccgggaaatcgtaaactctcttgatctccattggctctgtttctacccagtggccgttctcccagtaggagccctttgcagaaacctcacggatgttgatctccgggttaaagtttgtggcaaaaggatatccatggtcgcctgcattgcagtccagaatgtcaatgtaattgatctcatcaaaataatgtttcagagcataggcagaaaatacacttgttacgccaggatcaaagccgcttcccagaagagctgtgattcctgctttttcataacgctccttgtaagcccactgccatttgtattcaaatttggctgtatcctccggctcatagtttgcagtgtccacatagtgaactcctgtttccaggcaggcatccataatatgaagatcctgatacggaagcgcaagatttaaaaccacatccggctgtaccttgcggatcagagccaccagctcttccacattgtcagcatccacctgagcagttgtgatctttgtttttgtagttccctgaagcttttctttcagcgcgtcgcatttggatactgtacggcttgcaatgcagatttcctcaaagacttcgctgttctggcagcatttgtgaattgctacggaagcaacgcctccgcatccgataattaacgcttttcccatgaatggttcctccttaaatatgtaaatattagttttttattttttcagcgcaagaagcatctcccggatgatcttgcacgcaactgctgttgacattccgctgtggtcgcagggaggacagagttcattgacgtcgcagcctatgatgttcaggctgttgcatacctctgtgacatttttcatcagggtgagaaaatcaacgcctcccggctccggcgttccggttcccggaaatacggaagggtccagaacatccagatcaacagtaaaataaacaggctttcctttcagttccggcaaaatccccggaagatcatcaagagtaaaaggatgaaaatccgtatgaccggatcttgcccagtcaaactcgctcttttctccggagcgtattccaaactggtggatccgtccgtcacccagaatatcccagcaccgtctgataacagccgcgtgggacagctttaccccaagataatcctctctcagatctgtgtgagcgtccagatggatgatatgaagctccggatactgcctggccgccgcacgcacggctcccagtgtcaccagatgctctccgccgatcataaaaggcagttttttatccttcaggatggtctctgctgttttttcaatctcagaaagaacaagctcagaatctcctatggcaagctccagatctcccagatcaaagatccggcagtcctcaaggtctctgtcctgataaggactgtaggtttccagcccgtaagaatcattccttaccgcctgtcctgcaaatcgcgttcccggacggaaggaagtggtggaatcaaaaggcgccccgtaaagcacaatgtccgcttcctcatatccggcatcacagccaataaagttcattactgatttattcaacatcttccaaaagctcctccacatataccggaagggcaaacactccggcatgtaatcttggttcgtaatatcttgtatggattcctttcagcttccaggccactccgttcagatccgtaagaggatggtatttctttgaggcaaacccaaacagccagtgcccggagggataagagggcagatgagcctgatataccctgcagatcgggaaggtttccagaatacgcttgtgcattctctgacactgaaaggcttcctctgtataaaaaggactttcattctgattgatcatgattccgtcctcccggagagcaccgaaacagttcccgtagaattcctttgtaaaaagtccctctcccaggccaaaaggattgggagagtcaatgataatcagatcatagcagtctgtttttgaccgcacaaacctgaggccgtcctcgtggaaaatctgtactctgggatcattcaggctgcaggcgatctgaggcaggtacttccggcacacctccacaagaagaggatcgatctccaccatgtcgatatgctcgatctcctcatactttacaagctcccggacaacgccgccgtctcctcctccgattaccagaacgtcctttacaagaggatggactgccattggaacatgggtgatcatttcatgataaataaattcatccttttctgtcagagtcagatctccgtccacaacaaggattttgccgaactccttcgagtccagcacatcaatctgctgaaattcactttgagcgctgaaaagctgttctctcacccggatagaaagcttcacatcctctgtgtgttcgtcagaaaaccacatttccatggcactactctcccttcactacattgagattctcaattttttcatcctcaggtcctgtcatggagcagcccttatccttggcataaaggatatactctataatctggcctgtgatcttttctcccggagcaagaatgggaattcccggaggatagcacatgacaaattccccgcagatccttccctctgtcttttccacagggagtgattctttttctgaataaaaagattcctgaggcgtcatcacaacctgaggggagagatattcctgagtaagcatacctgtcttgtccttctggtatcttctcttaatatctgcaagggcgctgacaagacgctccacctcctgctttctgtccccgatagacagatacgccagcatatttccaatatctccgaactcaatctggatatcgtaatcgtctcttaaaatatcataaacctcgattcctgccagtccgatctccagtgtatgcacggacagcttggtggggtcaaaatcgtaaatgctgtcctggttgatcagctcgttcccaaaggcataatatcctccgatccggttgatctctgttctggcatattcagccagctccgccaccctctgaaaggactcctttccccgaagggcaagattccttctggaaatatcaaggcttgaaagaagcaggtaagaagcacttgttgtctgggtaaggttgatgatctgacgcacatagccgggatgcatattttttccgatcagaaggaaagagctctgggtaaggcttccccctgatttatgcatactgacagaggccatatccgctcctgcatccatggcattaaccggaaagccttctccgaaataaaaatgtgtgccgtgggcctcgtctaccagaaccttcatattcctgtcatgggcaagctttacgatctcccggagattggaacagattccataataagtaggattgtttacaaacacagccactgcatcaggattttcctgaatggctttctctacctgttccagcttcattcccagcgaaataccaagccggttgtccacatccggatttacatagatcggtgtggctccgcacagtacaagagcgttgatcacgcttctgtgtacgtttctgggcaaaataatcttgtcgcccttcttacagcaggtaagaatcatggtctgaaccgaggatgttgttcccccaaccataagaaatgcgcctgccgcgccaaatgcttttgctgcaagctgttctgcctccttgatcacagaaaccggatggcagagattatcaaggggtttcatagagtttacgtctatactgacgcactgacttccaagtaaatttaccagttccggatttccccttccatgtttatgtcccggaacatcaaagggaacgatcctcattctccggaattgttccagtgcctcgtaaattggagccttttcctgcgacatgtttcagcctccctcccgaaattcataggaaatccattattaaaacaagtactgtattttcctatggaacaaaaaaacgcaggcaggcgcataactttgcatctgcttgcgtttattatctttattcttataatttcttctatataatgtaaattttaattataaaaaacagataatggattagagtctatatagcaaatatttttacttttactactcttattgaccgtttcacaagttatgcatgcgatacgcataccggttataaagtaaccaacttataaaattcgagcttctaactcaatcaataatgcagttccctggactgcgtaaaatatttgcatggaagactttcctgactgttttccatacgtgtatatttataccataaaacgactttattttcaagaactttctaaaaaaatcattctgggtgatggaattttaccagtctgttttattccggaataacttataatgcatttattccaatttaagtcccctgtttcctgtatttgccctgaatttaaaggattttccggcttttcccgttattccggatctatgaacatggcgtccccaaagctgaagaaacggtaccgctcttttactgcctcctcataggcagccatgatccggtcttttcctgcaagagcagaaaccagcatcatcagcgtggactccggcaggtggaaattggtgatcagaccatcgatcattttaaactgataacccggataaataaagatttctgtccagccgcttcccgggtggagaacaccgtcttcatctgtagcggattccagggtacggcagcttgtggttcctacggagatcacacggcctccctgtttctttgtgtcattgatcagctttgcctgatcctcttccaccacataaaattccgagtgcatgtggtgattttccacatcgtctacttttaccggacggaaggttccaagccccacatgaagggtcacatgagcaatttttacccccttttcctgcaccttctgaagaagctcctgagtaaaatggagaccggctgtaggagctgccgcagaaccgtcattttttgcataaacggtctgataacggttcttatcctctaatttatgagtaatgtacggaggcaggggcatttctcccagctgatccagaatttcctcaaaaatcccttcgtactgaaactggatcagacggtttccctcttccaccacatcaatgatctcacctttcagaatcccgtctccaaaaacgagctttgcgccaggacgggcttttttgcccggttttaccagacattcccagatatcattttccttccgtttcagaagaagaatctctataagcgctccggtttcttccttgtgtccataaagccgggccggaattacccgggtgtcattgacaaccaggcagtctccctctttcagataatccaaaatatccgtaaaatgacggtgctccacgcttccgtccttcatggaaagatgaagaagtctggaagagcttctgtcctccagaggatcctgcgcgatcagctcctgtggaagatcataataaaaatctgatgttttcataatactactccttatcttctgccttctggctttcttccttccattgctttctccactggcggatctgattccattccttatttgaaagatctgcctttttcagaagatccggacgccatctggcagtacggtaaatggactgctctcttctccaggcctctacattggcatgatgtccggaaagaagaacaggaggcacttttttctcatgccagatttccggtctgctgtactgaggatattccagaagactgccggaaaaggattccgtttcaccggattcctgattggtaagaacccccggaaccatacgggaaatagaatccatcatcaccatggccggaagctcacctccggtaagcacataatctccgatagaaacataatccgtgacaatctcctcaagaaccctctcgtcaattccctcgtaatgaccgcagagaaaaacaagatccttttcttctgcaaaatcctttgccatttcctggttaaaaacctttccctgaggggtcagataaataacccttggctgatacccgatctttttttcaacagattcataggcaagatacacaggctctgcctgcatcagcattccggcgccgcctccataaggataatcgtcaaccttctgatgcttattaaatgcatagtcccggatattaactgcttcgatatccagaaagccgcctgccatggcccggccgataatactggtattcatcccgtcccggatcatgtccggaaaaagcgtcagcacatgaaaattcattatatcagccctttcatcaaatgtatggtcataacattcttctccagatccacgtccagaatacattccctgatagccggcagaagaacctcgccatgttccgcagaatcaataatataaacatcattggcgcctgtttccattacatcttttaatgtgccgaattcctgtccgtcctccaggacaactgacattcccagaagatccgcaatataatattcatcctcttccagctcctgtccctcttcccgtgggatccagagatcacggcctttatatttttcaatgtcgttaatgttatcgacacccttaaatttcagaattacaagatttttaaaaaactttacatttttaatctcaagctttcgaagctctcttccggtatccagaagcacataatcaagctccagaaaacgttccggctcatctgttgtggggtatacctttacctcgcccctgacgccgtgagtagtggtgatcacaccaaccttcagtaaatcttccataaataaaactccctgtagttaaagaaggagctatgtttccacagctcctgtttcttacttatgatattgcgaaagccctgtttactgcaggatatccacaatcacttttttgctgctctttgaagaagcggccttcactacggtacggatcgctttggcaatacgtccctgtcttccgatgaccttgcccatgtcagccggtcccaccttcagttcaataataactgcatcttccttttcgttttcggtgacaaccacctcgtccggatgatctacaagagattttgcaattacttctaccagttttttcattacatacctccctgcactgcattctgcaggacttctacagtaataggaaaaaataccctctccggtatttcttatttctcaattccggctgctttcaggatcttagcaacaacttctgtaggctgagcacctgctgcaagccatttcttagcagcttcctcatctactttgtatgcgcttggctcaaggttcggatcataagtaccgatctctgcgatgcattttccatcacgtttgcaacgggaatctgcaactacgattctataaaaaggtgccttcttctgtcccattcttcttaatctgatttttactgccatttttgttttcctccatttatctcttttctttttttgttaatttatattaaaagggaagcttaaagccgcctcttttacccattttaccgcccatcattccgggcatctgtttcatcattttcttgctctgctcaaactgctttacaagacggttgacctccgctatatccacccccgcgcctctggcaatacggtttttgcgggatacattcaggattgccggatttgtccgctcctgaggcgtcatggaaagaatgatcgacttggtgcgctccagcgcgctttcatctaccatcccttcaatatccttcatcttgctgcccactcccggaagcatattcaggatactgccgattcctcccatttttttcatctgttccatactggtgagatagtcgttaaagtcaaaatccatttttttgagctttttctgcatctcagcagcctgttcctgatcaatggcagcctcggccttttcgatgagactcataacatcgcccattccaaggattctggaagccattctctccggataaaactgttccagatcagaaagcttttcgcccatacccacatagaggatcggctttcctgttactgccttaatggaaagcgccgcaccgcctctggtgtcaccgtccatcttggtaaggatcactccgtcaattcctactttatctgtaaaggtctttgccacatttacagcatcctgaccggtcattgcatctacgatcagaagagtggcatccacctgtacattcgccttgatatcagcaagctcctgcatcatatcctcatctacatgaagacgtcctgcagtatccagaagcacaacattctgctgatttgcttttgcatgctccactgctgcctttgcaatatttacagggttctgtttatctcccatggaaaatacttccacgccctgtttttcaccattgacctgaagctgagtaatcgcagccggtctgtaaacatcacaggcaaccagaagcggacgcttgccctttgatttcagcttgccagcaagcttggcaactgttgttgtcttacctgcaccctgaagacctgccatcataagaaccgtaatgtcattgcccggtttgatcggcagctctgttgtctcgcttcccatcagattcacaagctcttcatttacgatcttgataaccatctgtcctggattcagtccgttcattacgtcctgtcccaccgcgcgctcctgaacagctttggtgaactgctttacaacccgaaagtttacatcagcctccagaagagccattttgacctctttcagagcgatcttaacatcttcctctgtaagacgtccttttcctctaagctttttaaatacattttgtaatttttctgtcaagctctcaaacgccatgctttataactcctctaatatctctttggaaatttctgtaatctcccggtcatgatacttctctgcaatctggctgattctctgaacctgcttcttaatacagagaaatttttctaccagatgcagtttcttttcatactcttccagagtatgattgcagcgccggatcatgtcgtgaacgccctgacggctgatcccaagctcctccgctacttcactgagggaaaaatcttccagtaccacgctttcatatacctgctgctggcgctctgtaagaagctccccgtaaaaatcatataataatgtctgctctacaaacttctccatctgataatcaccttgtgtatcataccctatatggctgccggtgtcaagtattttttctttacaaacttatgtttgtgttatttcgtctttgcttatctgctgtaaaatcaaagaatttctatttttcctgttttcggcttacactgtcttatttcttcttaaatttttaatttgtcacagactactaggatgttttgcttttcggggatgcaattcccattgtaaatacataacccgcttttctatatctggtcgaaggtgtaaaaatgtctgataccaaaagtaaataaatatagaggttttactccagcatttgtatatgcaattttccggaagatcagcacaaatctaaaggaatgaagaaccgtctttgttttgtcagggcggttttcttcgttttctgcttgtatcctgcttccagatgtgctatattgataatagaaaaagggaaagccagaacacacggcctacccttaaacaatcagcaacttacctttttacaaggtcagccgttcactatttgcggtagtgggcggctattttcttcccttgaagatctcgtaaatgagactggcaagggcaaccaacaagatatctatctggattaaatccgaatatgtaacatacattggcatcgccctcctttcctctttggtctggagggttagcccctccgaaatggagggcaggccgccttttatgtgctctgactttccataatgccagtatagcacacttttcctttagcaggcaatcaattatttccagttattttcgatttggacagaaggaattattttctcagcaatcgcacaaaattctgctcccaaaacccttttctttgtccctatcgaaatctgtacaaaatcctatttttaattcccagacaccgtataaacacggcatttttcaaaaaaacatgtcaaaattttttctttacaaacttttgttccctacacccagtctccgggatgttctgcgtcaaagtcaaacacaaatctctcataggcattgatcacatgagtgtcctggtacttatcgtagcgcttatgctttcttccatacgacatatgcacatgcccgtgaaggaaatatttcggacggtacttttccatcagcttcaaaaacgccttaaatccctgatgcggcagatctcttccatcgttcagctgatatgccggagcatgagtaaccagaatgtcaaaccctctcctccacaaaagctttggaaacagcttaaagattcttcgtcgcatctctctttccgtaaactgataaatcccgggtttataccgcatggagccgcccagccccaggatcctgaccccctcatgcacataaatggtatcatcaatgcagatacacccgtccggcggaatcctttcatatttatcgtcatgattcccatgaacataaaggacaggcgcggaagtaaaggttgcaagaaatgacagatatcgtgggtccagatccccgcatgaaataataagatcaatcccctccagtttacttttctcaaaaaaatcccacaggtactttgattcttcatctgcgatcgcaagtattttcatattactgtcccttctccacgccctgctgcaatgtgacaggctttgcctgctccgtaagctgccagcttttcggaatggaaccaattacattatctgccagccagtccatggtaatgatctcttccggagacagacttccctgaggatcatcccgaatcacaccattctgtgaataaagcacgccggaaaacggattaaattctccgcggctgatagtctctttcagaagctccacaaggtgctgggttcctgtcggaagtgtatgagaacagatcacatctacaacgttggaggacattccccaccagtagttaatggctttcttttctgagctgctgtcgtcatatttccaggttccgttcataacagtgcggatcagctcctcataaaatttaccccagtgccacaaaggcatggcaaggttatgcggcattccgttttccatacggtacagcccaaagtatctggacgcatcttccggaatcaccatatcacgtcctgataccacagaaacctccttttcccggattctctccatgacctgaccaagatcatcatcctttaaggttgaccactccagatatacctttgcccttggattcaccatggcagcacccagcgcaaaggcattgatatttgcaatagttccaaaaataggatagtccgcgatgtaggcaagtctgccgttttcggacattgcccctgcaattgcgcccatcaggaattttgcctcgtgcattctcgcataataagtccggatataccggtgtgatgtattcagagaacagttcagtatcctgatatcaggatttgcaatcgctacctggacacttgcctgaacaaaggcgggagttgtggtaaagatcatattgcagccctttgcaatggcgtctgcaatagctttttccgcaagctccggaacgatgttttcatagcacatggtagtaacttcatccggaaatgtctgttccagatgaagacgccccagttcatgagcataggtccatgcggaggaaccgggagttttcgcatagataaaggcaatcttcagcttggtggagcctgtgagaagtctgctgagcaaaggcttcttttccctgttgggatccatcttcagatcgatctcgttgtcatgctccagaagcttaaattcctcccagcttttattgacaagctgcttcagctctgcaacagttttgcggcatacggcctgatagccgtaaacagtaataaaggcaagaaaagcatccccggctgtaatggaaagcttttttcctcctgctgcctcaaactccagagcaaatctggaataaacagagctgaaattcagtttgtcatcatcatcccagacctcttttggtcctttcccaatcaggttctgcagtctggcaaagcttccctcctttgtaaaccatatgtagtttactttggatagctcgtaaaagtccacaaactcataataaatcttattttccttttcttctgttttcggcggaaggatacgggtaacaacacccggaacagaaacagcgtcatagtacttcagaacactgacccttttatttccttcctccacataaaatttattcatgtattcataggccttgatcgggtcacgaatcccttcgtttacatgactttctccaagaactgcccacttataggcaaattctgtattttcacgcagaatgggcataaaattccctgcaaaggcattgcttctggattctgtttttgttcccacaatctgctccatgggaatctgaaccagtcccagagaaacttctgaacaggatccccgggcaggcagaatatcgtccagcacctctaacgtaggcttttctcccttcatcattctggcctgataatctttttttccaagcttatacgccttgttatactcttccagcatttatgtatccctccaatactttcactgtatttatttttctgcatttcttttttataaatataccccagctccctttctgacgcaagcgtaaaaataccagaaaaatcctcctgtctcagtcagtatgacggattttctcttatagcttccgtcatttcaaagcgcctccggtaatggtgttctgcaaaaatatgttcttgccatttttatttgtatagagtattctttatattagaaagatttatttaaggaggattctttatggaaaaatcaaaagtatactataccagcatgagaaccggatttgacaacggacttctggacaaactgaaacgcctgatcaaaaaggccggtatcgaaaacattgattttgacggaaaatatactgccattaaaatgcacttcggagagcccggcaatctggcatttctccgtcccaattatgcaaaagtagttgcggatactgtaaaagagcttggcggaaagccgtttcttacagactgcaacaccctttatgtaggcggacgcaaaaatgctctggatcatatagaaagtgcttatgtaaacggcttttcgccactttccaccggctgccatatcattatcggagatggtctgaaaggcacggacgaagtatatatccctgtagaaggcggagaatatgtaaaagaggcaaaaatcggacgtgcgatcatggatgcggatgtgtttatctctctggcccactttaaaggtcacgaggctaccggctttggcggaaccctgaaaaatatcggaatgggatgcggctcccgggccggaaaaatggaaatgcacagcgccggaaagcctcatgtagaggaagagctgtgcatcggctgccaccgctgcgaaaagatctgcgctcatgatgcgcctcagtttaaagacaaaaaagcttccatcgaccacaacaaatgcgtaggctgcggaagatgtatcggtgtctgtccaaaagatgccatcgttgcagcctctgacgaatccaatgatatcctgaactgcaaaatcgcagaatacacaaaggctgttgttgacggacgccctgctttttacattaacctggtgatcgacgtatctccttactgtgactgccacgccgaaaacgacgcagccattgttccggatgtgggattctttgcctcctttgacccggtggctcttgacattgcatgcgcagatgcagtaaatgcccagccggtgatctccaatacctgcctttctgaagcagaccacgaaggtcacgaccacttcggagccatgtttcccaccacagactggagaacctgcattgaacatgccaaaaagatcggccttggcacagatgaatatgagctggttgtagtcaaataaatacaatcgaggaggtaaataatagtcaagcatggatggacatcctaacttggctattatttgattagaaaagatgtcctcggctctccgctccaacaaagctagcactaagactgatgaatttacatttgagtatatattacataaaacataccaaaagccaacaaacccaaaatagcacacatcttaagtaagcgcaatataatttaacagattgcgttgccctaaaaatcattccattgaattattttgcgcttactttataattcctattctaatctctcttaaaaatatctcttgtatatacctttgccttcacatcatccaagcatgcatcataacgattggcaataattgcctggctttgcttcttaaactcttccaaattatttacaactttacttccaaagaaagtacttccgtcttccaaagttggctcataaatgataacagaagccccttttgccttaaccctcttcataacaccctgaatggatgactgacggaagttatctgaatttgacttcatcgtcagacgatacacaccaattactacttctttttccatagaagcatcgtaaatattctcatctccataagcataatatccggccttctgtaagacacggtctgctataaaatcctttcttgtacgattggattctacaatggctgacatcatattctgaggaacatcgtcataatttgccagaagctgctttgtatcttttggcagacagtaacctccatatccaaaggatggattattatagtgcgcaccgatgcgaggatccaggcaaacaccatctataatctgctgagtattcagccctttcatttctgcataagtgtccagctcattaaaataagaaactcggagcgccagatatgtattggcaaagagttttactgcctctgcctcagtaaatcccataattaatgtatcaatgttttcttttatagcgccttcctgcaaaagtgctgcaaaagtattcgcggcttttacaagccgggcattttctacatcagttccaacaataattctagaaggataaagattatcatataatgcctttgattcacgcaaaaattccggactaaaaataatattgtcacaatgaaattttttccttacacttgctgtatatcctacaggaatggtagatttaatcaccataactgcatccgggttatatttaataaccagctctatcactgcttctactgcagaagtatcaaaaaaattcttactgctatcatagttagtgggtgctgcaataaccacaaaatctgcatctttatacgctgattctgcatccaatgtagctgttaaatttaattccttttcagcaaaatacttttcgatatactcatcttgaataggactgattcttttattaatcttttctaccttttccggaaggatatcaacagccataacctgatgatactgtgacaacagcgttgctattgacaaaccaacgtatcctgttcctgctactgcaattttcatctttttcttcctttctctcttctcttaatttctgtactgatgcgtcacttcagtaaattaacctttcgtgatgttataaaacatctgtcagtcaaataattcttaaccaacaaatcctccaccataagtctattataataaaaaattatcaggagacacaaccatgcacatcagtaactgcgtttatatctgctatttgattatgctataatattttctgtctgctatgaaagatttgagacctcttccatccttgcaattttcggcaaaaacaaagccgctgccccgggttccatccattcagcagcagctctgtttttattacctaatcctatttcgtatttacctgttctctgtccccatacatcttttcataatacttctgatactctccactgataatggtctcccaccattcacggttctccagataccatttgattgtctttttgattccatcctcaaacctggtttccggataccagcccaattcactggatattttctccggatcaattgcataacgcatatcatgtcctttacgatcctcaacgtgagtgattaaactttccggcttaccaagctccttgcagataatttttacaatctcaatattcgttttttcattatggccgcccacattgtaaacttctccaactcttcctttatggataatcagatcaatagccttacaatggtcctccacataaagccaatcgcgaacgttcagcccttctccgtataccggcaaaggcttgtccgccagagcattggcaatcatcaacggaatcagcttttccggaaaatgatagggaccgtagttatttgagcagcggcttattgttacaggaagcccgtaggttctgtgatatgcaagcacaagaagatccgcagctgctttagaagaggaatacggagaactggtatgaatcggtgtctcctctgtaaaaaacagatccggtctgtccaaaggaagatctccataaacctcatccgtacttacctgatgatatctctggattccatacttacggcaggcgtccatcattactgcggttcccttaatatttgtatccaaaaatacctccgggttctctatactcctgtccacatgactttctgctgcaaaatttacaacaatatccggatgctcctcctcaaaaagctcatagaccgcctttctgtcgcaaatatccactttgcagaaacggaaattcggattatccatcacaggcgctaatgtagacaaattccccgcatatgtaagcttatctatacatacaattcggtattccggatgcttgtccagcatataaaaaataaagttgcttccaataaatcctgctccgccagtaacaaaaatattcatcttctctcttcctcctatatcactgcagaatatccatatattttccatccagcacgtccttcagatactgtccgtactgatttttcttcaatacttcatataccttaagcacgtcctctttgctgatccatccattcagataagcgatttcctccagacatgcaatctttctgtgctgatgagtttccattgtttttacaaaatttgtagcatccaccagactctcatgtgttcctgtatcaagccaggtaaatccctgtcccagaagctctacattcagatttccatcttccagataaatccggttcagatctgtaatttccagttctccacgagcagacggcttcaggtttctggcatactccacaacacgattatcatagaaatacagacctgtcacacaataattactctttggctgctccggcttttcttcaatgcttacagccttgccttcattatcgaactcaacaataccaaaacgctgaggatcatctacataatacccaaataccgtagctccctttccattttcagcattttgaaccgctgctttaagacgctttttcaatccatggcctgcaaaaatattatctccaagcaccatggcaactgtatcgtctccgataaaatcagctccaataacaaaagcctgagcaagtccatccggtgacggctgaacagcataagtcagctgtacgccaaactgatgtccatctccaagaagctcctggaatctcggtgtatctgccggtgtagaaataatcagaatttctctgattcctgcattcataagcactgacaacggataatagatcataggtttgtcgtaaatcggcaacaactgtttagatgtcaccatagtcaatgggtaaagcctcgtgccggatcccccagctaaaataattcctttcatgaatctctcctccttagtatcttttctatataatataaaatcccaccaatcagacctccgatggtgttataaaatatatcagcaagctaaaacgtgccttatccaatcgcctctccatttttaccagagtaaaatttcccaaaatattattccaaaaagtgttctaaaatctcaaagatactacacacaaagaagtaataataccggaatagcctgttcttacaaacctttctcagcctctgtttccataagtctttccatcttaaaccatcctttagaagcttgactatagcgaaaagaaaaatacatgtccatgtagttacttgataaatttttataaaatacagtaattcactcctgagtttcttaagtgtggcttttcataagttccaagtaacagattactatcatattttatctataataaattccatctttttagcaatagtgtctatacgtttactaaagaatacttcaaaagtataacttcttgctaattcaataacagtgcaaaccacaaaaaccaaaactatgactaaaattgaataaggtattaatagattactttcataatatgatgcattcataaatacatcttcccataaaaatgagcgcacataactattatcatgtataagataaacaccaaaagtcgctgaagaaataacattaataatcttattaaagccaatattcagctttaagaatcccaaaaataaaagacttgatataatcacgattggtaaactatgcatctcataaaaatatgtagcatgttctccaaaaaaggcaatctttgttccaacaatatcaaaaataactgttagcaaaaatgtaaaaagtacagctataagtgctgtcgaaatataactttttgtttttatctctgtattaaaaccatgtaatttaatatatcctgcacaggagtacaagaaaataaaccacaataaagcattacattctaatgtacgtcctgtaaatgtaggtatgatacaccaacccaatataagtaataataaaagtctctggtattttcttttctccaaagaacataataatatattaatatatggttgcataagataaagcacaaaatacgttgtaacaaaccaccactgcgaaaaaataatcggcaaaaaattctttatcagttcttttatttcaaattgctcaatacccgttataacaaaaataataaatataacacctgaatatgttaaaatttgcatccataattttaatatcttgctaatttttattgattttgctgttacagaaaaatatcctgatataagaacaaaaatattaacaccaatttttcctcccatttgtataaattgaatccataatctattaaccgtcaagctatttgttgaaaattcaaatcctccgtgcacggaaaaatgatgtgcaataatcattaacatagaaataaccctcaataactccatgttcgatttgcgtcgtatgaatttatctgctatattacttactttatctttatgtttcattatataaaatatctccatatttcacaaaatatatattttgcctgataattactaattatagaaacttaaattctccttttttatataagtttttatttgcatcacaatatttttaagagtgtcacgcataaaaatactcaacataataaaagttccacaaatatataaaacaaaacctaacacagatttaaaatttaagcctataacaagaaacaagataacttgtcccaaaagatatatgtattctctcagcataaaatttaattttctgaagtcaaccactgttatgaaaaaccaaacagttgcggaaaataaagtaccgagcgcaaatgcctctttcacatgtatcactgcataacataaaatattaaagccaaatcccacccccaatattataactagttttataaaatatattttttgttttttttcaactttatacaaattaacgaaaacactttttattattatataaaacatttgtgcagcaaataagtagaacatagttttcgttgaatctatataattgttaagaaaacattctaatatgaacttaaccggaaacgctaccgcgggaagaattgttgcaaataccaaaacatatcttaaaatgttactttgtttctctacatttctttctcggcaaaaaaaattatataatgtggttgtaatcggtgtaatagcaacatttaaaaaattctctacactcacagcaaaagaatactgagcaaagtcaaatattgtaagaaacgcttttacaaaccatctatccatgctagtcaataacatcgaagctaaattaccaagtgtcaaaagaattccatcgcgaatatttactgtcaattccttccaactaaatttttttacagccataattatatgttgtcttttaaattgaatttctaaaatcatccaaattacataatataatataacatagcaaaacatataaatcagatattgatctgttcgaaaaacaaacaataaaatcatattaagagcaaatgtagatatagtagataaattcataatcttcccatataaattaaatgccccggttgcttgatataagaatttaaaataactagcaatattttgcggtaaaatggatattgcaaataatacaataatccagtcatgactaaataatgcaaaaaccgtaatcattatagtaatgcataactggaaccaatgcattgtagatatattttttgcaaaatcctcatttaattcttttcctaaaacacttcctccatattttaaatacattccatctatataccctaaatgaaacaagccaacatatgacacatatagctgaaaagtttttatagcagcataactctctaccgataaatatttaggcaataggaaattagctaacaaactaaatattacatttatcatatttgcaataaaaatcaagtaaatacctcttttgagttctttatccatttacctatcctttcacattacatatatcccacaatcttttaccaaatctataaatattggtgatcttttttatatggaaaattatgttaatacatatattctcaattttcttttaaccctttaatgcaatgagtacctctaatacaattgatttttttgattgaaaatatcgcaaataaaacaacaatttaactgcatttaataattttctatccctcattagctctatgcgcaatttcatcatttgtttgtttttttctattatagttattctatcagaatcaattaaattcttttgagccattctaagcatttgttctgctgctttatattttgcatcaaataattccactctttttttcactgtatgatatttaccataagttgccgtattattagaatgtatacgatgtttcaccaaatcacagtgtacatataaacatctatttacacattgagccagtttccaacatcgatcatcttgtgcccaacctgaaaaccaatactcacgtgttaaatctctaaactctctacgtaaacacatacagcatcccaatgttcttaactctatattctcaatagatacattaattcgctctatatttccagtattagccttacgctcctttaatttctttggtatctctggagctccttctccataaataaaaggctcataatcactacacaataaagcacaatcaggatttttttccattatatcaaccattttttgaattttgtcagtaacccatatatcatcttgatccgaaaaaaatatatattccccctcagctagtccaattacttgattaaagttgtctgcatatcctaaattcacatcatttttatataattttatcaaattttgaaaactattgcttaaaatataattctcaatgagttctacagtattatctgttgacttatcatcacaaattatgatttcatctatttgatatgtttggttgcagatagaatctaactgctcttttatatatttctcaccattatatgtcgccattacaactgaaactttcatatatttctctcccaactttattttaatcacaatcacaaccgcataagattagtgtatatctagattctctaatacagtattccatatctgacctaaaagtgtagctaaaaaatttttatagcataaaccaatagagtcttttacaactacttgtttcttttgctattttttaatcgcacttaggttttctatcacactttttctcttccaatccacttttttctatagacaatattgcaaacaatatatatatatatacatatgtttgtaactgatccagataccataaactaaaaaaataacaagtaaaaataatcagagctgcttttgaaattacattatattttgcaaatctttctttgaccgccttaacaaacatacttagctgaaacaaaataaagaatattaaccccggatatgcatacgtaacataaactcccacataataattatctatagattgtatccaatacccttcaatagcataactgaaatgataagataatcctctgcccaaaatagggtttaaataacttaaatcaaatatttgcaacagcaattttcgataataattactattatataaggcctcactatctgacccaaatttatttgcatatgttgtacctaaaattgtatctatcacattaaaaaatgactgtaatatagaccgtgcaatttctgtattggagaacagaaacaaaaaaaatgtaagtaaaactaatattattcccaaaaatgcaagtgttatcagcttccttttccgatcacaaaaacaaatcaataatataatttctaatcccagtacacctaaggcaagtctagtacctgtaaaaaatacatttatacacaacaagaggaataaccatttatttttcaaaatatctattgtattttttttgtatacaatacatattaaggggattaaaatcagtaaatataaaccatatccatttgcagttgtacatggtccacaaatcctaataccaccaaatcgttccgctgtctctgcgccgtaattcaaagttcttaaataggaaaatggagacttatgtattatcacttctataatcccacatataccaagtatccaggcatatgtttttatttttaatattaaatcttccacacctatttcatatttaacaatatacagaattacaaaaaaagctagtactgtatcaatcactatattgaagattccattcaaactaacacgaaaaatatttgtcaacaaacaaatgcaccaaaacaaatacattggaatatatattaatctcattttaaacaaactgacaaattgttttcgtcttgtattttttctaaatattccaaataaagctaataacaagaaaaaacgccggattgttaaatcaaaaaactgtaaatctatgccaaaataattaggcatcacaaacaaacagaacaaataacaatctacaatacctccaaacatcaattgtcccttaactactaaagggcgcattatcctatctgttttttgcacgctttcaaacatatccttccctctatatattctaaagtccccatgtgattaaattctatccttccattttgacatcatatatataagtttgccaacccaagttacagtaaccttgttaataataaatacataaagttgcaattttgttcctctataatatttgtttttacgaaactttggaaattctctaagtactttttctaaactttcttttaaatacacgtttctcatttttttatcttccaaggaggccaatctctgaaacgaactccctagtaacattttcgaatataaatattccagttcttcaaaaaaagtatcataaaacaaattactatgataatatccaacaataccatccataatttcaaacatttgaatatatctttgtgcacctatcaagccagtagtagatcctggccaattaatatgatatacaaatggctgatgcacatttatacattttctgatatgtggaaccaaattcacataaaatgcagtatcctcataaatcaatccttctctaaattctacacctgattcttttatcctggaagccaaatatagcttattccatggtgctactttaggatcaatcagcaattgttttgtctccgttatatctttgactctaattactttgcaaactttatcgcaaatgtcatagtaatcgcacattaccatatctgcatgctcttttatagccaacttatacatagtttcatacattgaagcttccacataatcatctgaatctacaaaacctatatatgttccactgcaaagtctaattccttgatttcttgcctttccttgtcctccgttttcctgtacaaagctcaaaatacgccctggaaattttaaaacatattcatctattattttctgagatccgtctgtagatccatcgttcactaaaataatttccagttccgtcatggtctgtgaaagtaacgaatctatacatttttttaatgtcttttccgcattatatatcggcacaactacactaactttcattgatccacttcccctgtttcaataaattttataatcaaatcattaatatattcattttgagattcaaattttttggggttgaaatcatcgatatttacaatacattctcgcagttcttctttgttctttgcgcataatacatatcccttatttacaaaaatatcacacaaatccaattgatgattatcatagtgctcaccaaattccactagacgaggaaacaaaatcactttctttccctttttcaaacatgaagtcaccgttccagttccagcatgagaaataatcacatcggaatctgaaattaactgtttgaatttttcatcagacatcatgtcaaaggttttataatatgcagaacggtagccatcatgcccagtttgagcaataacatgttccttgtttaatactttctcttcacataattcatcaactatctgaaacaatctggtaaatttacaccctaccatacttccaattgttattaatacattcaatatatccaccccccaaacaatgcattgggataaaattttaacagttctttccactgcacaataaataaatccgcatatttgtacatgaattttcctgttttactcggagaactgattcgagcaaacgtctcaataaaaataacttttttcttgaaaaattttgctatcaaacacataggaatcgcattcgctgcccctgtagagattacaacatccggcctctctttgtaataaacaatcagttcttccccaaaccacagtaacatctgcaaaatgaacataagcttattggttctttcccaagttatagttaaatattttttttctttcattgtttgcgtgttttttgttttgggcaacacataaaaaaaatcatatttttctcttattttatgtaattgtctcatctgctccagatgaccgccagatgaacatatcagacatatttttttctccataataatcctccattaactatattgaacccattttttttctttttcatcataccttttcacaatacatcctggagcacctgcaatcacgcaacgttcgggaaatacaccctttatgacagagtttgctcctacaatacattggtcacccaattttgttcctggcataataaccgccccataaccgataaaacagttctgacctatttccgtttgtaatacttctacatcctgttctaatatatgtagatttaactcttgataattgtgattcacatttgaaacaaatacatttccagaaatagttgtatctttacctattttcaaatcgcctttataggaaacaacatgaaaattttgtccaatggaaacattatcttcaataatgattctagcattttctgtagataattccgcccgcattccgggatagattcgcacattatttccaatatataagttcttctttctttgaacaaaagtaatttttcctatataggaatgttgtccaatttttccatacataggtctgataaaaattgttctaagataccatttaagctttgtcaaattcatatttttccctatctgggaagtttatgctttagaccctttcccagattttcctatattatattttttcacaatcttagcaggagctcccacaataatactgtaatccggaaaaactcctctgactacagaattagtacccacaatacaatgccaccccaaaacagagccagcctatatagctgctccatacccgataaaacatccctctccaatagacgtctcccgcaaaatgtatccttgattcataatgcctttttcaatgtccgtatattcatgatctatatttgtaataaacgtatttgctattattgttgcattatctgctatccgtagcccccctcggaagttatatgtacattctaccctattactatttctccaatacctatatcttctatgctaattccaggaaaaattcttgttttatttccaatactaatattcttccttccttcaataaaacagagttttcccatatatgtcaaattaccaatatgtttaaaaaacaccttatttaccatacatctaactgctccaactattttcataacatgcattatcttgcttctcctcattcacgcaataatatacttaaccaatttcgcagagaatacttctcgtatatatcctgttcaatttttttatatggcattttaaagaatggagcctctaaatcaaacattccatcatacacataaatgttttcttcacagtaaaaatcataatttacaatatcagtatttgttgtaatcaattttttttcagctcccaatgcttcaaaaacccgaattgtcaacccaatctgtcctgcctgtgcagagtccataatacatcttgattgtaccattactccttccaattcgtcttttttcattggtgcataatgaaattctttataatgcgctttccataattctttatttcttacttttctataaaaataaacaattcttgacggaaaaaagaaataaataaactgcttaggaaatactgtttttaactgtgctgacatctcattgataaatttatattttttgggatgtgctgttcctacaaagcaaaaatcatattttggctcacttgacttcttttttgcaattttttcatactgcctactatagaacaatggcaaaaattgcaatccaatattttcttcaacgtcatttttatcaaaagaataacatttatcaaaatacttttgcagtttttttatgtaagcaaaatttttctgtgaatcccattgatataaaatgtatctagcgttcggctgactttcttttagtcgttccaccattttctcatcaaaagaaaaagactgtccagaaatcacaaatacaacatcatatgtatatccactgacaatttccataatattatcaaaatattttttaatataatgatgtattaaattcttgttcacacgtataatagctttcacaattccactcgtactaggacggtcatcaaaatagtctactatatgacccatttgctctaattccgttttaataatttgcggatactcaaagaaattgggcataatcagaagaattctcattatttatctctcctattcttctagatattgattcataatctgctgaattttgtttgaatccccccacacagccttagaatcatatggtctatctggaaatgctccgtattgtaatttgatatcgtaaccattttcttgaataaatctttcaacacgatctgccaatttttccggtttcccggaacagatattaataataccattaatcttactctgatgaaccgtagccgctacttgcttacaaaattcatcataatcaatgaaatcaaactgattttgtcccattgtaaaaggaaattcttttcttccttcctgtgctgctaaagctatttttgaaaaaattgatgaaccaaactgagcatttcctacaatataataacctctcaaccattgccatacaaccttttctgaattcgcaaccattgtttcaagacaatttctcaaagcatttttacttataccatatagactaagaggatgacatggagtattttcattaatgcttccctcaaaaaaaccaatttcatgcatacttcccatcacacaaacatgctttaaccctgcatctaacatacattttaaaaagttataatgcttaggcaaatcatttatatgatttatagaataatggacaaacccatctcgccatgctaaatgtaacaacacattaggattcccaaaatactcatatggtttttctatttcaaatagatttccatttatacaaactgctcttttatcaacatagtctgtttgtatatctgtcgcaataacatcgtgaccattatctaacaactgctttacaattccctgacctaaatatccatttgctcctgtaactaatattttcataagtatactctcaatccttctaataaaagatatctattgataattaactctctaaaacaattacttttataattataatattgtaattatttccttatgggataaaccccggcggttcaaaaaccgccggatctccctcctattatttacggagcaacttcctctgttgtaacctctgtttcctcttccggaagctccttataaatcagagcgatcggggatgctgaatggaaagaagcctttacctggttttcacttaccttctcaccttccagaacctcccagttatgctcctcacagtaatggagcacatccacctgaatattatctgtcatgttatttgctgtaaaagtaacctctactggctcttcttctgtaggctctttctccagcttcagatccataacaggagaaataaacttatattcactgagatcaatatcctcggcaactgttccatccatttttacgaaagaaatcacaggcatttcctcttcaccaaaaattgccagaaatgcatctttcactgttgtatcagcatctgccgcctgcagcgcatctacaaccttctgaatttcttcctcataaagatttgccacgtctttgctaagtgttgctccaacagtttctacttccatttccaaaccgccaacggtttctttttcagactctgtattctgagttgttgtttcagctgtcacattatttgtgtcaacagcatctgtaacacttcctgctgccataacacttacgctcattgctgctgcactggtcactgccagcattcccgctactgctttttttaatttcatttccttacctccatttaatgttatataataataaataattttattattttcctgatgataaaaatgttttttcagaacaggcttttttccagatatgcctgtaccagataacggtattcctctcctgccggatcatgggtagataatgtgagaaaataatcatttgtatcaattggcgcatcctgttctattgtagcatccattgccctctgactgagaatatccttgataaatgcacgaatatttccttcatatatcccctgattaaaccgcttcagaagatgacggttatcattccggtaagctgcaaaaatacgatatatcagaatctgatccggtgtataaatatagataaccggatgctcttccatgaataacttatctctgtattggaacagactgccaaaaagagaaccgtcctccttattctccccataaataactgttaaaggatcagagaaatcctttttattcatttcctctgtaaaggcaaaatcctcttccccctcagaatcctgaataatcggtgtatccgccacccctggaattgtcagccaggcatagatatcctggttttctttttgaagctccgaaaaatccactggtatctgcagttttccatcttctccgtaaaatcgtgattcatcaccggtctgacgtatctctttctgctcctctatccgtttcaggcgttcctcctccagtttttgacgttcatagaatttccagccctgatatcccatagttccgactgtgcccaaaatcactgccaaacttactacaatcattatttttttcataggcactattttttcacctcttgctcaatataaaatacatccagaatcaattcatacagagcatcgtcatccaccttatattcatcataaacacttccctgtactgcagttcccttcagtgctatcaggtcctctcctccaaaggtcatatttaaagcctctgtggaaagataaactgctttgtcaagactgatatccgttaccatctgctgggagagctcctgatacaaagtggctgggagtgtataatccttctgtacagcttttaccgcctgcttaaaaaagttttccagataaatcttctgacgattcatacgaagagtattgctgtcatgaatggctgtgtttctccacttggcaaagtaaaaggcgctgtttcccttaagagtaactgtagctccttttgtgagaagtggatctacagaactcagatcctcgggaactgtaactgtaactcctccaacagcatcattgatcgttgcaatggccgacatattaaaagcagcatatccgttaattgggattccgtaaaacagccgagatactgcatccaccatatactgacagcttttctctctgccatcgccaaaagcataagcaagaccaagatgattcttttcttctcccagataattacctctggcgtcaaaaattggaatctccgtcatggtgtctctggaaacagcaatcaccttgatcttatcattcagcggattcattgccaccagaaagattgtgtctgcctgcccgctttccccggaaatccccagaatctgttctacttcctcgcttctctgatcgattcccataaaaagcagagtgatcatttcttcattaaatctgtaggcctttccgttatgatagatcagatccgtctctctattggcaggtattgttccctcctcacgggattccatgcttaatgccactgtgctgacattgccctgaagcttctcggccccgcttgttcgcagataatggtaagcgccaaaagcgcctcctgcaccaactacaaggaccagcagaaaaacaagcgccactctgacagcaatcaaatatgcccttttctttcggaaagcttttctccaaatccatacaagcactgcacccagaagcccacccagagtattaaagatcagatcgtccacatcaaagattccaaattttcctcccaactggaacagctctactgccagactgaatccaaaggaaaatcccagactatgcagaaaaattcttttttttccatgctgccatgcaaatccgattcccagcggtacaaacagcaaaagatttgccccgtcccgaatcagctcccggttaatatgatcaaagtcccgaaaaccattcagcggtgcaagattcatcctgtacagctctgagctttctctggtcagaatggtgatcagcaacacacacaccatataaatgactgtcagtccccagacacaggctcttctccagaaaatctttttctctgaaggtatgtgaagtctgggaatcaccaatccataaaaaaccaggcagctcagaatcagaatcactgctgtaagataaacccatgagggtacagcctgaatttctgaggacagcgtatccagtcctttgccaaaatcacttaatattttcaacttttacctctattcctgtttacgaagctttgacaaccaacttcagctgtttgtgctggctctcatggccatccgcatctgttacataatattccagtgtatattcccctggtatattaatatcaaatacaccctttacacgaattctccgaaacaaagaagatctgtcatccttgtcatctgtgatatcggcaacctgggaaaccacgtcaaaagactgaccgactgatatttccagggtatctgaggcaagcgccagaaccggaatttccgggtctgaaggctctggtgttggtgttgatgacggctgtggtttcggtgttgacgtgggctccggtgttggtgttgcctttttctccatagttgtctgagtattggatgaaatctccatcttctggtttactccctccagagactgcagcgcaatccacagagaaacgcccgctgccagaagcagtacaactgccgccagtatcctttttttcatttcacacctccttacagtgagtcctcggtgttcatggatttttcatccagatctatatagcgtttatattttccgtactgcttatagctgctgtatttaccatatcccccatatgtggaataaccgcccggtttccggttgatcagataacccaaaagtttctcatttctgataaagggttcaagtccatccttaatttctcttgtgatagctctgtcatgacgtaccacataaagtacagaatccgcatattctgacaaaagcgcagcatctgtgaacagcgccgaaggcggggtatctatcactatataatcatagtcatttaccagagcctccatcaaatgctccatttctttttgtttcaaaacagaggaagccttgtcacggacacttccgccacagatcacatccagattattttttgactgtataatatcattcaggaaacatttctgtttaaaataatccgccagtccatgatgattctcttctaatcccagaattttgccaatggaaggatttcgaaaatccccgtcaactacaagcacttttttatcctgcatggaaaatcccagagctatgttcagcgccatcagactttttccctcctcaggaatcgtactgctcacaagaagaacatgcttgttttctttttccatctgacgttcaatcctgttctgtgcggccagaactgcctgcttaaatccccaatctacatgtttattggtaatcagaagctgtgcttttttaccgttcctcctctttttctgccgggcttccggaatcatggcaacacagcctttcactgtcagttttttcatatcgctttctcttcgtactgtctttgtagtaaaagcatagacagtagcaatcacaaaacaaagagcagctcctgccagtaatcccattgcagctgatttaggaagagaataggggttggatgggttctttccggccagagactcatccgcaatctgaagttctaccgttccggtaatttcagacgcccatttcggatacacatctttaaagttttctataagaagatttgtatttttataattatttgtttttaaataaacagtaaaaagattagacccttctgtattaacagaggaaaactgataattatcattcagacttttttcctgaatattttctgtcagatcctgtctgaattcttcaagcgctgtaacagaaggaacagataagctgagacgcttggcaatagacgcatccgttgctgcatctcctgttctttccacagcataggtgagctttgcttcataaaaaggctcatagcttctgttaaaatacgcaactgtcaaagcggtcacagtcaaaagcaccagaagaagctgaagccaacatcgtttcagacaacggatatagtcctccaagagaccactcagatccagtacaatttcatcatcttcatattgctccatattattctgattttctgtatacatttatttgtctccattccttctgtttccgtagccatagtaatactttccgtaacggtgtttctttcggctgccagttccctgcgccatattaattaccccaccgatcactgtagttccagtctcttccaaaaggtctgtcacgtcattcagcaccgcggccttttctccgctttgctttacagaaagaatcactgcttctgcagttcctgcaagaatctctgtgtcacggacaattccaataggaggtgtatcaataatcacataatccacatgtttttggaatacatgaagaaccgacttaagacgaccgttgctcaaaagctggtctgcttccggaaccggctgcttctgccatacataaatcagacctttatatttcctagaatgtctcattacctctttcagaccaaccttaccctccaaaagatcagatacggaacttccctcctgtacttctttctcaaagatctttgccatagccggcttccgaaggtctccatcaataagggctactttttttcctctgaccgcaagactcagagcaagattcgccgccagagttgtttttccctcattctcatgaatactggaaatgattgcagtctttaatcccctgtgatccattttttgttgaaaatatgttgccagtctgtccatctcttctataaaagacgggtcagccataggatctaaaatcagaagtcccttctgccctttccgttttttcacacgatgaagaacactgaggatatccatgtcaagaagatccgctgcctgctcccgactgtaaatcttatcagaaaacattgcaattaatactgtaagccccacaccggccataagaaccagcgccgctgcagcacaggcatacttcagagaagacgcctggtttttcacaatattattggcagaaaagctgttcagattctttaccacatatcctgactcaaaatatcctgccagctccggatagctttctgtggctgccttcagaagccggaatgcctgttctgtggaagaggctgtggcgcttaaagaaatcaggcttgtatcaggaatctgaaccgcttcaactgttcctgtgatcccttttgctacttcagatttttttattttttcctgcaaagtgtcactgttcagtacattaacatttctggtaattgcaccattaaagttatactcagataattttccgatattattatctcgaggcaaaatcgttaaataaatactagcagtataagtgtcctgcatataggtatccaaaacaatatatactcctatccctgccataactgaacacataagagttacaaataatgtcctgagtactcttctaaccagatagcctatgtccagagagatatatcctgtattctgtcgttttttttctgcgttcatcatgccctcctactctaccactaccatcagatgggcagtgcagtcatagcctgtcttcggcgctgtgtaagtatatattacattgtaaatcccaggagtatttgtatctacatcagaattaataccaatctgagagatatttacccatccaagctctgacccgtttgctatctgttctgtgacatctttccactcattattttcaaatacagaaaccattgggccatagtcaatcttacagacacccccatcatttacataatccagatatgcattaggatcaaaagcctctccctttttcagataaatcagattttctttaagtgcgatagacgggcggagactcctctcttcatagctgtccgcataaatctccacctgtacaggcagggaagttttatctccaatgctgtttgttacattaatcgtacagtcataaagtccagccttaggctctcccccaagaagactttcatctccttccagagtgataaacggagttacatcaccgtcaatgcagtcttccgcctcaatataatcaaacaaagataattgctgattttccggaaaacgcaatggcgagctaatagaaaaatgtgccttcctgtaatcagaatacgtcagctttctggtaagccttcctatattactggaattatcaaaagcaacatatgttataaggaaagaattattttcaccttttgctgatttttcaatactttcaataacaatgctgtctgtcacatctccgtccttttcatcccgggctgtgattccttttttcagttcttcttctgtagccttgatactgacttttatctcttcttcagatgcctttaaaaccgggccttctgtatcaatatctgtttgctttttttcgtaatactgatatcctccaaagactgtagccatgcataaaattgccagtatgattcttgcttttttcattagctgctcctttaatctgtatttactgtattaccggaagcccttttaaaatacggcttggattttctgacatccacagtcgtacatataaatccggataatttttttgaagctgttttaccaacactttcatatgaggcggacgaatgtctgtatcatgtgtatccgtagcaatgacgcttataatacccgaatccagcatttgcttcgcaagctgttcgcttttccggccaaagctgcccaggagactgcccgcattgatctgcagggcacacccctgatcagccagataccaggcaagctcctcatctctctgcataaaaagatatctttccggatgcgccaaaatgcaccgatacccactctgtttcagacgagccagactggaaatcactatctccggattttcctcaaaaggaaactctaccagaagataatttgtgttattcaaagtcagaagctgcttctgcgccaaggcctcccatatggcttcatccacaaatatttccattcccggataaagtttcagagggattttttcctcctccaatgcttcctgcagcttctgaaactcactccagtattcctctatcatgtaaggatagtaatttccatgactggtagccgccatatggctgattccctgattcacagcaattgatgccatttccagtgcttcctccatacatctggctccatcatccagccctggaagaatgtgcgcatgtatatctaccataaaacctctatcttattttcataatttatgtaacgatttttacatagatccctcgcccttaaatacggcttttactgtctgcagcaatatcctgatatcaagaccaatactccaattctctatgtatccggtatccagacggacaacctcctcaaaatccgtgatatcacttcgtccgcttacctgccacataccggtaatccctggcttaactgcaaggcgcgctctgtggtgaaggtcatatttcacccactcatcaattgtcggcggtcttgttcccaccagactcatctcacctttcagcacattccaaaactgtggaaactcatcaatagaagtctttcggataaagttcccgattcctttgcccggtcctttttcgctgccaatgatcctggggtcattttccatcttgaacatcagaccatcctggacgcgattctgtttcataagttcttttttgcgttcctccgcatccatatacatactgcggaatttgtacatcttaaaccttttaccgtttttgccgatacgctcctgtgcaaaaaagatggggcccggtgattttaaataaatcattggtcctacaatcgctgtcaaaagcactgtcatcaaacagcctgtcaggccagcgcagatgtctatcatacgtttcagaagaagctgctttttcgtggtcatattcaggctgctggaaatcactgtgtagcctccaatctgttcaacagactgcttattattcaatttcgtatgtccacctgcaactgcaagatgaaccgtaattcccattgtaagaaactgttcctgtattttttcagtctcttcatcttccaatggaagacacagaaaaacctcgtcaatccattctctgcaagaatactctgccatatcagaggcatcagccacaacaggaataccctgaatagtacttcctttccactgagcatccacaacagcaatacccgcaatgtgataccctgcatagttattagatgtaagctgctccacaaccttattcaggtatgctttggaagaaacaataaggagtgattgagcgccgacaccatcctctctccttctggcaagtacatgtttccaccagcttcgcgccgcataagttgtaactgcataaaacactgctgtcaggataaaaatcgtacgggaatattcctcactgctctgtgtaacaaccaaaaacagtgcagacagacctgtaatcaaaatcacatggcgaaaaactgctgtgaattccagataatatcctcgcttaatcactccctgaaacgtgtcaaaaaataatgtaacaaatatctgcgcaaaagcaagaataaaaaacatacttctataatatatactggtaagaggattttctcctccctgtcgtatataaaatgccaataaaaaagacagctccaaacacataatatcaattatgataaaatcgacgtgcttcagccatcctgttgctttcttttcatacatcgcttttaccccccccccttgaaaaattcgaaaactaatattcaattttagatattctttttcataacatacatttgcattataacccattttttcttatatagtcaataattttttcataatttattaattttgtccaattttaaggttgctgtttaaattatgcataattagtaatccacaaattattgcataaaaacaacgcccactgaaaagtgagcgctgtcaaatagttaagatactttatttccccagttttctctgtacagccttcacgatctccatgatcgggatgatcagaactgcaaggccaagagcgatcacgtattccgtgaaatcaattggtgtaaactggaatgcttttgcaataaacggaacctcgattacaactgttgtcaggatcagggaaacaaccattgcaccatacaggaatttattatggctgttcagtttaaagatagatccccggcggcttctcatgttaagggaatggaaaatttccaccatagaaagggtaaggaatgccatggttgttccgtctgcactgtttacaaattcccatgcgccggattcgattctgtgacctaccagataggagatcataacaagaacagttacaacggcgccctggaaaaatacgtcaaatcccattcctccggcaaaaataccttctttcggatcacgaggctttttcttcataatgtctgcttcgctcttttcaagtccgagagccagagcagggaaacagtctgtaatcaggttgatccagagaagatgtaccggtttcagtatagtaaatccgatcatagtagaaaagaagattgccagaacctctgccagattggaggcaagcaggaactggattgccttacggatgttcgcataaatacggcgtccctcttctactgcggatacgatggttgcaaagttatcgtctgccagtaccatatcggctacatttttggttacgtctgttccggtgattcccatacctacgccaatgtcagcgctcttaatggacggagcgtcattaacgccgtcaccggtcatggcagtgatcatgcctttctttttccatgcatttacaatacgtactttatgctccggctgaactcgggcatatacagaaaactcttcgattctgttctgaaaatcctcatcgctgatctcattaagctgtgcgcctgtgatagcctgagaaggatcggaaaggattccaagctccataccgatggcaactgcggtatccttatggtctccggtaatcataataggacggattcctgcttcacggcactctacgattgcagccttaacctcaggacggaccggatcgatcattccggaaagtcccagataggtaagttcctgttccagaaatgcaggctctgtactctccggcattttgtcccattcacggcatgcgccgcagagaacacgaagagctctgtcagccattgctttgttacttttcagaatagatgctctgatctcttctgtcataggaacctttgcgccgtttacaatcgcatgggtacagcatttcagcacctcgtcaggagcacccttggtaaactggatgatctggttttcttttgttttgtgaacggtggacatcattttacgcatggaatcaaaaggagcttctcccacacgtacgtattcttcttttaactgtgtctttggcaggccgtttttagccgcatcgtttacaagagcacattcggtaggctctccaactgcctctcccgcttctgcatcgtattctgcatctgaacagagagccattgcgatctccagattctgctcattgtcagccacatgctccacaactgtcattttgttctgggttaatgtacctgttttatcagagcagatgatctgtgtacatccaagagtttccactgcagtcagcttacggatgatggcgttgcgtttggacatatttgtcacgccaatggaaagtacaatggtcacaaccgctgccagaccttccggaatagccgcaactgcaagagatactgcaaccataaaggtgctgaggatggtatcgccgctgattcctgaacggaacagtcctactgcaaaaatcactgcgcagataccgataacaagtatggtaaggatcttactcagctggttcagttttatctgaagaggtgttgcatcgtcttttgcctgagaaagagcctgagcaattttacccatttctgtgttcataccggttccggtaatgacaaccttgccgcgtccgtaaacaactgtagaacccatgtaggccatatttttacgatctcccaagggaacgtccttctctcctccaagctgaagaagatctgtgattttatttgccggaactgattctcctgtgagagcagcttcctcaattttcagacttgcagcttcaatgatacgtccgtcagccggaactgcatctcctgcttccagaagcacaacatctccgggaacaagctcgtcacttttcagtgtcactacttttccgtcacggagtaccttgctggtagcggctgcaatttcctgtaaagcctcaattgcagcttctgccttactttcctggacaacacccagtactgcattaataattacaactgcaagaataataataacgtcagcaaaagactcgccttcataaaaagctgtgattccggaaattgccgcagccacgatcaggataatgatcatcgggtctgcaagttcccctaaaaatctctttaaaagagaagtctttttccctttttccagttcattctttccgaatctggacagtctctgctgtgcttcacctgttgacagtccctgttcggaagaattctgttcttttaaaacttcctcacagcttgacagatattctttcatattgcctccatttctgtgcagcatgtttgagtttctgcacgcttttgttttatttctgagggcatttccaaataaaattttatccggtctgccaaagaatacggcgtgtgatgttcactcctttctgacacttctcctacctttcattatacccggattctgcattttcaaaaacaaaaagacttatctcaggattcctcccaaagataagtctcgctgtttcaaacaaaaccaggtctcccggccatgatgttgattctgttacgcctttacggtgttagctactcccttacacctgttgtattcatttctgctattatgcatcatttccgggaaaaatgcaactgtttttttatttttctttatacgaaacaatactatgcgaacatcagcctgtgatatttatattcccccgggctgatgttcaaaaagaaaatataaatattaatttttttccatttatggtacaatactatttacataagtcatagacaaatgacggatacagaaagatgaggattttttatgacatttatcagcgcttttaatgtactgggtccggaaatgatcggtccttccagttctcatacggcaggcgcctgctccattgctctgcttgctcagcaaatggcagacagccctgtaaaggatgtggaatttgtactttataattcttttgctcagacctataagggccacggaacggatctggctcttcttggaggggtcatgggtttttcaacagacgacaagcgtataccaaaggctttttccattgcagaagaaagaggtatttcctaccgctttatcgaggcagcccaagatccggacattcatccaaacactgtggatatccatattacctgccagagcggacgctcttattctgtccgcggtgaatctctgggcggcggaaaaatgcgtatcagccggatcaatcatattgatgtggatttttccggagagtacagcactctgatcattattcattatgacaggccgggagttctcgctcatattacaggatgtctcagtgaaaaaaatgtcaatattgcttttatgaagcttttccgtgaaacaaagggagacattgcctacagcatcattgagtttgacggtacgctgcctgatgacgcagaggatcagatctcgctgaatcccaatgttcaggatgttatttttataccaattcaaaggagaatataatcatggattttaaaaatgctcaggagcttctggagctttgccatacaaacaatcttcctgtttctgcaattatgaaaaaaagagagtgtattctgggcggaacaacagaaaaagctatttatgatcaaatgaaccattctcttcagattatgagagactctgtcacatctcctattcagtccccccaaaaatcaatcggaggtctgatcggaggggaggctcagcttgtgaaccagcaccgggttggaggcaattccatctgcggaccggttctttccaaagcaatcgcctattcaatggctgttctggaaacaaacacaactatgggactgatcgttgctgctcctaccgccggttcttccggtgtgatccccggtcttcttctggctcttcaggaagaatatcagctggaagataaagaaatcattgacgcactttttaatgcaagcgccattggatatcttgccatgagaaacgccactgtagcaggcgctgtaggcggctgtcaggccgaggtaggagtggcttctgccatggctgcctcagccgctgtggagctaatgggcggcacagcggatcagtgtctccatgctgcaacatctgttcttatgaatttcctcgggcttgtatgtgatcccatcggcggacttgtggaatgcccgtgccagggacgaaacgctgccggagttgcagttgctcttactgccgcagagctttctttaggcggcatcaaacagctgatcccttttgatgaaatgcttcagaccatgtaccaggtaggaagacagatcccgcccggactgcgtgaaacagctctcggaggctgcgccgctacccctgccggaaaaaaactgggctgtaaaatttgtcccagataaaaatacaggaagaacagctatgataaaaaccgttatttttgatattgataataccctttatgattatgacagcgcgcatctttttggaatggaagcactgacagcctactgtataaaagaatttcacatttctgaacaacagatacgttcctgttatgacaaggctatgaagatcatggcaaaacgcattggcacagacagcgctgccattcacagccggatgcttcgtttccagtgtatgacagagcttttgtcccagccgctttttcctcatgtagaaaatatgtatcatgcttactgggataccatgatcgccaatgcaaaaccttcgcctggcattctgaaggtacttgaagagctgaaaacacgtcatatccgaatcggcatcggaacagatatgacagccagtattcagtttaaaaagctgaaaaagtttggatttgattcctatcttgactttgtcgtcacaagtcaggaaacaggcgttgaaaaaccccatccgcatttttttgaggtctgtctggaaaaggccggatgcgctgcggattcctgtgtttttattggagataatctgaaaaaagatgtgcagggcgcctgtgactgcggactctttggtgtgtggtacagtcaggaaaaaatccctgaaaaagaaaatagatttcccgtgatcacaacatttactgatctggaaaaatttcttcaggtgtgtaagatcttatgattttacacgcctgaaaactctaaaagatttaaaattattacccataaaaaagttatacatcaaaacactgacttatttgacgcttacaagctctatctgattacatccttgcggagcgttttttgtttaccagaaaagtcagtacagaatatatttttcccggtaaacaaaaaaagtagccgatacggctactgatgttgcacattcaaaactacatacatgttgacatttggaatcgtgtgaccaagctttcgctcgaatgcggtcacctcatgactccgtcattcggtgccttttgcttcgcaaatgtccagtccagttaagaaccactccttcacaagcaagcttgttccgtcctgtttctttcctgtcctgaccgctttctcgctttttggtcaagccctcgaccgattagtagcagtcagctccatacgttaccgcacttccacctctgccctatctacctcgtcgtcttcaaggggtcttacttctttcgaatgggatatctcatcttgaggggggcttcacgcttagatgccttcagcgtttatcccttccaggcttggctacccggccgtagacttggcagtctaaccggtacaccagcggcccgtccatcccggtcctctcgtactaaggacagctcctctcagatatcctacgcccacgccggatagggaccgaactgtctcacgacgttctgaacccagctcgcgtaccgctttaatgggcgaacagcccaacccttgggacctactacagccccaggatgcgatgagccgacatcgaggtgccaaaccactccgtcgatgtgaactcttgggagtgataagcctgttatccccagggtagcttttatccgttgagcgatggcattcccacttaataccaccggatcactaagccctactttcgtacctgctccacccgtcggtgtcgcagtcaagctcccttctgcctttgcactctgcgaatggtttccgtccattctgagggaacctttgggcgcctccgataccctttcggaggcgaccgccccagtcaaactccccgcctggcattgtcccaccgccgggtcacggcggatggttagaaacccaatactgcaagggtggtatcccaacagcgactcccacacaactggcgttttgtgttctcagtctcccacctatcctgtacatgcagcaccggatcccagtaccaaactggagtaaagctccatggggtctttccgtcctggcgcaggtaaccagcatcttcactggtacttcaatttcaccggatgcattgtcgagacagcgctcaaatcattacgcctttcgtgcgggtcggaacttacccgacaaggaatttcgctaccttaggaccgttatagttacggccgccgtttactggggcttaaattcaaagcttcgcttgcgctaacctctcctcttaaccttccagcaccgggcaggcgtcagcccatatacctcacctttcggtttcgcatagacctgtgtttttgctaaacagttgcttgagcctattctctgcggccaggtctccctggcaccccttctcccgaagttacggggtcattttgccgagttccttgacaatgcttcttccgccggccttaggattctctcctcatccacctgtgtcggtttacggtacgggtacggtataaactatagcggcttttcttgacgcacagctcacgggcttccctactttctttcggtccgcgtcgtgtcttcccattgacacacggatttgccagtgtgtctggtacctcacttgcaccgggctttccattcccggctcccgctttctgcacgtgtccccacagttctgttataccgcagtacaggaatctccacctgttgtccatcggctacgactctcgtcctcgccttaggccccgacttacccagggcagatcagctttaccctggaaaccttggatattcggccataaggattctcaccttattctcgctactcattccggcattctctcttccatgcagtccacagctccttacggtactgcttcgtcccgcatgcaatgctcctctaccaatcatttctgattccttagtttcggtggcgcgtttcagccccggacattttcggcgcaggacctctcgaccagtgagctattacgcactctttgaatggatggctgcttctgagccaacatcctggttgtctttgaaatcccacatccttttccacttaacgcgcactttgggaccttaactgaaggtctgggctctttccctttcgactgcccaacttatctcgtgcagtctgactcccggtaagcaattctgcggcattcggagtttgatattcttcggtaggctttgacgccccctaggaaattcagtgctctacctccgctaatctctaccgaggctagccctaaagctatttcgaggagaaccagctatctccgggttcgattggaatttctcccctatccacacctcatccccacccttttcaacggatgtgggttcggtcctccactgcctcttacggcagcttcaacctggacatggatagatcacccggtttcgggtctgccctcactgactctggccctcttaagacttggtttccctacggctccggtccttaagaccttaaccttgccagtaagcgcaactcgccggaccgttctacaaaaagtacgcggtcgtgcatataaagcacttccacagcttgtagacacagggtttcaggttctctttcactcccctcccggggtccttttcacctttccttcacagtactatgcgctatcggtcactaagtggtatttagccttagggggtggtccccctcacttcccgcagggtttctcgtgtcccgcggtactctggatcctgctcagtctgctctgctttcgcgtacggggctctcaccctctccggccggctttcccaaaaccgttctgctagctttacagaatcttaaatgcagtccgtaaccccagcgtgcacgcacactggtttaggctcctccgcgttcgctcgccgctacttacggaatcgagttttctttcttttcctccgggtacttagatgtttcagttccccgggttcccctccatacgttatggattggcgtatggatacatgaggtttcctcatgtgggtttccccattcagagatctccggatcaatggatatttgctcctccccgaagcttatcgcagcttatcacgtctttcttcggcccttagtgccaaggcatccgccctgtgccctttctgcttgacctttcgcttttcatcaccctagcgtaggtgatgcggtctttgattctcgcgttacttaagtaagtgcacgatcgagggataagtgcgggggaagtttacttccctgagcgcttatcgcgcagatcgtatatgcgacgcagtcgcggctgaatggatcgcagatccatgaagctcacttactgagtaactgttgctgataaataaatttatcgatgtcttcctatcttacgttttacgtttgtatcaaggatcttcgtgtaacttaagtaagtgcacaatcaaaggataagtatgttggaagcttgcttccataaatgcttatcatgcagattgtatatgcgacgcagtcgcgaccggggaacctttgttccgaggtgcacttacaatcaatacacaaagttacatgtatgcagttttcaaggtgcatgtctgactgatcttttatcagtcatcagaatccgcaagcttccttacaaactctaatcactggtaaaaccaccagttttcaacagctcttcccggctggttcgggttagcaccggacctctcaaatctcttctggctccactatgtttccgacatagctcactttccagtgcctgtatttatctcaacaggtctccctgtttttctttttttgatctggcggccacctgctctcccacatcgtctccaatgcagtaccatcggccgcttgggtcttaaccgtcgtgttcgggatgggaacgggtgtctcccccaagcgcatcgccaccagaagcagagtacttaatgagtacaagatttatcgccgtacgaatttagtacggactccgttccgaggaacttaataagcccaactgtaaggcagggcgagtttagtgaacggaacttccttgtttccccttaatacctagacagtgaaacacatctctctacttcttcttccttagaaaggaggtgatccagccgcaccttccgatacggctaccttgttacgacttcaccccagtcatccgtcccgccttcggcagctccgtcctttcggttcggtcactgacttcgggcgttactgactcccatggtgtgacgggcggtgtgtacaagacccgggaacgtattcaccgcggcattctgatccgcgattactagcgattccagcttcgtgcagtcgagttgcagactgcagtccgaactgggacgttatttttgggatttgcttaagctcacactctcgcttccctttgtttacgccattgtagcacgtgtgtagcccaaatcataaggggcatgatgatttgacgtcatccccgccttcctccaggttatccctggcagtctcctcagagtgcccggccaaaccgctggctactaaggataggggttgcgctcgttgcgggacttaacccaacatctcacgacacgagctgacgacaaccatgcaccacctgtctcctctgtcccgaaggaaaggtgacgttactcaccggtcagagggatgtcaagacttggtaaggttcttcgcgttgcttcgaattaaaccacatgctccaccgcttgtgcgggtccccgtcaattcctttgagtttcattcttgcgaacgtactccccaggtggaatacttactgcgtttgctgcggcaccgaatggctctgccacccgacacctagtattcatcgtttacggcgtggactaccagggtatctaatcctgtttgctccccacgctttcgagcctcaacgtcagttaccgtccagtaagccgccttcgccactggtgttcctcctaatatctacgcatttcaccgctacactaggaattccgcttacctctccggtactcaagatcaacagtttccaatgcagtccgggggttgagcccccgcctttcacatcagacttgctgctccgtctacgctccctttacacccagtaaatccggataacgcttgccccctacgtattaccgcggctgctggcacgtagttagccggggcttcttagtcaggtaccgtcattttcttccctgctgatagaagtttacataccgagatacttcttccttcacgcggcgtcgctgcatcagggtttcccccattgtgcaatattccccactgctgcctcccgtaggagtctgggccgtgtctcagtcccaatgtggccgtccaccctctcaggccggctatggatcgtcgctttggtaggccgttaccctgccaactggctaatccaacgcgggtccatctcacaccaccggagtttttcacactggatcatgcaatcccgtgcgcttatgcggtattagcagtcatttctgactgttatcccccagtgtgaggcaggttacccacgcgttactcacccgtccgccactaggattataacgacttcaaccgaagtctctgtcaaaataatccccgttcgacttgcatgtgttaagcacgccgccagcgttcatcctgagccaggatcaaactctctgtaaaagtgtgtaagcaattcagcaatgcttgcattggcttaattgcatctcaccgattgagccaaaggctcaagaggttgttccactcaagataactactagctatctctcgttttactgttgttggttcatcgaaccgttctcaaataatgaagttcgattcactaaattcgatcttcgcttccgcttgatctcattaagttccttcgaaccgcactcacactaaattcacacttcgcgtttccgcttgtgttcattaagtgttctgtgtgtaaaagaattttcgagaatcgtatgtgtctcactgtttagttatcaaggttctttgttttctgtctctcagacagctcgtttactttatcacatctcttttcatctgtcaagaactttttttcaagtttttttgatgtttttcgaggtgttgtcaggtaattggctctctcgctgacagcttgtttactttaccacactcagaaaggattgtcaacaagttttttgacttttttcaaagtttttcaagttgtttcttcaaaagaatcatttctttgtgacagccagattaatttaccactttcttccgcctctgtcaactgttttttttataaatttttaacactaattttttgctcaattgcaatataccttttaccatctaaaataaaactgttaactataaatgagcaaatatcgaattttgcacaatacaattcggaatatacggacataaaggaaatgcgatactttatatgagcatcccataaagacaaatcatcgaggagtttatgcactttttcaagcctgcttatttatagctgctaaaataaaattttaaatttctttgcccataaagctttataaaatcaaagcacaatatctccaattgccaacctgctcttttttttgtataatggaagaaattttgtaaaccacaaggaggaacaattaatgaaaggaaccttatacggtgtgggcgtaggcccgggagatccggagctgatgactctgaaggcagtgcgtctgatccgcgaaaataaaatcatagctgtaccaggagcggagccgaaagatacggttgcctacaagattgcagtgcaggcagtaccggaactggcagaaaaggaacttcttcccatttatatgcccatgactcatgatcctgaggaactggaaagcaatcatgccagaggcgcaaagacactggaagcagttcttaataaaggagaaaatattatttttctgacactgggagatccctgtgtttactctacttttacttaccttcagcgcctcgtggaagctgacggctataaaacagctcttgtcagcggtattacttctttctgcgctgctgccgccagactgaatattcctctttctgaatggaatcagcagcttcatgtaattcctgctgtgcaccgtctggatacttcgttaaacgaacacggcaattacatactgatgaaatcaggcaagaaaatgaatcaggtaaaggaaattctcgcgcagagtaatcgtgatgtacttatggtagaaaactgcggcatggaaaacgagcatgtatacagaagtgttgaagaaattcccgacagcgcaggatattactctctgatcattgccaaagagaaaaaagactcttaatttttattacagaaattttatcctttattgattaaaatcaaaatttctatagcaaaagcaggaatattcccggtttactgttagttttacgctgataaggaagtattcacaataacttatcactaacgctgacagacagagtgcaaacagaaacagagagctaatcactttcaatagtggtcagctctctgtttctgtttgcactttgttacgcgatagaacatcatttttgagggtagagtagaaaatatgacggtgtgaaattttttctgcaaattgagatcttctatgataattgggcggcttaatggcagttttctgcggttaagccattgtctatttaatagcaaaaatgaatgaacatgtcaagagcacccagaaaaatccgggtgtgttttttcttgacatattatttagaattaccccctcaatcggtcagggtatagtggttcagttgtcaagacaaaaatctaagctttttcacaaataaattttatatctaattttcaattatccgcataaatactatgctttcatgcattttgaagtatattgaaacactcattttaccccgaatttaccacgattgaatgagccttgatatgaccgtaaaactactaagggagatagcacgagtaactatgtatctcccgattttcttttatacagttgattacttcactcgtatttcaaatttcaagattgctttcatcatatctgtataaatttctccttttagttcttcatcaacctgcataatgattttaccactttcagagtggtaaaaaggacgcaagcataatttagaatataagtgtcataaaacttcagaatttctctgattgccaattcatctccacttgacgctctgcaaatcaattcaaaagagggatagccataatctttgctcattctttttacttcctttcgcttaaaagcgtttttaacttctttagtcctctacttattctgctaaaaatagcagaacgtgatacatggtacagttctgaaatttctctgtcgttcatgccttgaaaataacgtaataaaattgcactacgctgtttttctgacagtctatgtaaagctgtaccgagtgtttcatcagatacataaatagtaaagtgcaagactttaaatgatacacaatcataaaaataggtgtcattcgttccacgttcaacctgtttcgtttctgctatttcgcaaaacaatacttcaagtttagaacgtcttgcaagctgtctgtaacgactttttaatttgttcttaatgataatcagcattaaagaattaaactgtaacctgacgatatgctcgaaagaagatatcctcataatctcaccccctttccgttaaagtgggatatataaacgggaattaaagtgtccgtttataccgttgcactaacttacggaaagaatgtgtctataaaaaagcccgtacaaaacgtaaagtttgtacgggaaatattcatagaaatcctatggacttataaagaaatataatttactgcctcaatatatttttctgttacttggtaagaatctacactttattctcttttactgataatgggaaatgcacatactgtccatgttttttcgttcttttaccgtattgaattgcaaatttaggacaatggtgtaggcaagaaaggcacataacacactgctcttgattccatactggttgcttattcgttatgtctatggcggaaatcggacacttttgggcgcagagtccacaacctacacaggtattttctacatggaaatgacttgttttacgcatagtatcatactccatattgtaaaaccactttgcaataggcataggaacttttctttgcatataatctcctatggcacgatttataattttatctattacagaatctatttgaagttctgccctttcatttatctttctgacatattctttattgcttaagttaaaagttggtgtccatgtatctggcattttcacactgaaatatgccgaaatttctatattttgcttttgtaatatttcattcgcaaaattacctatttgccctgtggttgttccataggttgcaataaaccatatataagacggttttttgttcaagtttattttcttcaaaaattcttttacaatctctggtaatccccaagaataagtagggctgacaattcctaaaaactcactttcatgaaactcaaattggaattgctgatttttcatacatgcagtgatagaaacggttctgtctcctgttgcctgagaaattctttctgctacataacggctgtttcctgttgctgaaaaataaataatcataaaaactctccattaataaaatttttttgcaaagtacatgatgaacgaggacggaaatactttactcacaactcgataaaatttataaaagcgtccaggtgtatagactgcttttttatgctctgctctagctaatgcattttttgttactttctccatatcaagaaacggtaaggtattaatctgtttactttgtctggcttgacctttagggttcatttctgtatccatgttgccgggacatagcaataagatatttacattatttcttttttcctcttcccgaagtgcttttcctaaagcatagatatatctttttgatgcactatatacagcctgatgtggaattggtgtaaatgatgaaacagaacatgtcataatagcaaaactatctttcgcaaaatatggactacaaattctttgtaccatagtcaatccttttacattgacagaaatcatattttggatatctgatgcagacatatctctaaaattgcctgagcattcatagccggcattattgacgagaatactaatttgtggcttttcatcagataacaatgtttccagtttgctatattcctcatcagcacctaggtcaagcgttatcgcacgtatttttttatctggattatgtcttgcaagatttttcaatctgtctttccgtcttgcaataatccagatttcatcgagtttaggatactgctttataatcgtctttgtaaattcaactcctaatcccgaagaagctcctgtaatgactgctattttcatatatacctctctttcaaaacattcgttttaatttagacacttgtaaaaattgtaagttcatgttagattaaagatagcctatgtgcaagagtcaatactctaaaaacgtctaaatatagacatatttaagaaaatgcaaaaggagtccatactgtgaaatacaatacaaacaagaaaatgacaagaggtgcaaaaagaactctcaatgattttatgtgtactatgtttaccatgctttctgaaaagaactttgaagaaataacggtaggagaattatgtaagtgtgcaaactatcctagagcgactttttataattactttgacgataaatttgacttattgaattattgttggataggattgacgcaagaaattcatttggaagaatatcatcatatggcgcatgaagaagcattgtatattttttttgaccgtatttatgattacagcaaaaaaaacgaaaagaagatacgtggcatcttgacgcataactcagaaattggatatatgttcagtagtttccaaacttttatgaatggtaaaatgcgtgaactttttcattcttgtacaatgagtgaaaagatgttgattcccaaagaaatattggcaaaccattacagtaatacactattgcttatatggcaatggtgcatattaaaaattcaagattgtacgaaagagcaagcgtgtgcctatttaagatatttagtgggtaatttgtgaattactcgctaccactttctatcctttctctaatccctctcctttggagcaaggcaaatcggcagagccgccggaatgaaaaagaatggaacgggaacggcaatataaaaatattgtttgttatgttatgcagtagaactttatttttaagagcgggagtataaatcccttacccctgctcttatcttcgctgtaatgccgctcaactcaggcgaaaagactttatcgcgtaacattccataatgaatacctaaagcgatactcgaataatacctgtatcagttgcgcttccaagcggtcttgaatatcagatagtgaccttgaaatacagatagatatttcatataccctctgtaataacatacgacattatgtattgcttccggctctccttcaactactttttcaatggtttcaaaaggtattcgcttttcgttcttcatgttccaacctctcccattcttttcttaactgtttcagtgctgccagtttccaatagtttaaattatacggcttcttttactttgtacttcaggaatccagttatcgtacaaataattccaataaccaaacttataagcaatacaatttcctctgcaccatacacatcatcaagacatccatgcatcacaagaaaaagaggggtcgcataaataaatattgcgctcattcccattaagagcatcctgagaatcacaggcattccccaacaaaccgccgatacaatcacagctgtaaaagaagtattatatttagccgatatagccaatgtaattgcacacaaaaggaaaaatccttgcagtccaaataataatagtctaactaaatattgagagaaattcacttgatatacagctcgcaacattttctctccaagtactatccctgtcatattagtaaaaccatccattccataaaccaagccgcacaaaataaaatccaacaaaacaactacaataaagacagtggcagttaataaaaatgccgaaaaaacctttgcataaacatctttccgccgcccctcctctgttgtaaaaataagtggcagcatttttgtctgcccttcttttgcaaataccgttgaaatgctgcatataaccacgatactgcctaaaacaagtccaaactgcaataattcaacaaaagcacgccatccttttacatactccaaagtaggagcaatccccctgttttcacacacttttccaagctcggattcttccaacgcatacgtttgcgtgggaagtatttgtgcctgccagtttccgtttgtgaagtacaaagcaacaaaatcattcagataatttccgtctctccagtttggcatattctcgcttaacttagatggaatcccatatttcttgataatctgatcaattttttcgtctgtgatgattccttcaaattcttctgtaatttttcggtttacctgtactgcctcatagccggaatatgatttttctccaatcactgcaagctcatccccaacttctgcgaaccaaaaaaatatcatcattaaccctattacagaaagaactccccataaaaaaactttctcatgatataacttgtaaatttccattttaaacaaccgcattgtttttccctccaagcacctgtgtgtaataaaggtatgcatcttccaatgttgcttccgtaatttcagcgtttttcataggctgtatatcagaaacaatacgcaactccacgttctcgccgctgtttcgtaagttgcttaccacatatttttcattcaacccctgtacctcacattccggaacaacgcatttccagacatatccctgcacgtcagcaatcacctcattctctgttccctgccggataagttctccgtttttcatcatcaggatacaatcagcgatatattcaatatctgatacaatatgggtagacagcaacacaatccttttttttcccaaagaactaatgatattacggaatcgcacccgttctttaggatcaagtcctgctgtaggttcatccaaaatcaaaatatccgcttcattcaaaagagcctgtgcaataccaattctttggagcatcccaccagaatatgttttgagttttttatttttgacatccttcaagtcaaccaattccaacaattcctctacccttccttttgcataatctctcggaagtgctttcagagccgccatataattcaaaaaacgaactgcggtaaaatctccgtaatatccaaaattctggggcaagtatcccaataactggcgatattctgcgcccatatccgatatacggatattatcacaggtaatgcttccatttgtcggctgtaaaattccgcaaatcaatcgcatcaatgttgtttttcctgctccattttcccccaacaaaccatagactccatttgtaaatgtgaatgtgaatcctatgactgcatctttctccttataccttttttgtacatccaccagatttaattcatgcataatatttctccttttatcatttctacaaataactttttgagttgtagggcaaatacacttcccaatataaaacaagcaattccccacgctccaagtgataccgctgaaaatactgttggaaccgcagagaaaacagtatatcctatcgcaagaaaaacactgctaataaaaagaaagtatctgttttcccgtccgatttctgtagacaggattcctactgacacaatattagacagaaaaaatgctgtcaccacatatagtccaagctgtaaaataccaatattcagagaacttccaatgtagaaaataatcaacaaaaatattgcaagatttatgctgccgacaattaccatataagctgcaacactctgttttgtactgaaatagcagcttgctcccaactctgccattctgcccaagaataatttatcaattaaaaatacagtgagaacagcaattccagaaacaccaatcatacaggcaattatcattgtatttatgtctgcccctgctcgctgtagcagcagtaatatacctatacaaaaacaaacagctattgcatgtaaaataagaaatgacttatccatatataaaaactgactgaataaaatttctctttgatttaataccggaattttttgctgttttagctccatggtcatagaagtaagtacctgttgttttcttgattcctgaatcgcaatttgtttgtcagcctgtaaaaaaagctctttgatttcacgattttccatttccgtcctccaccattctctttaaatgctgtacacccaagcgaaaccttgattttacagttgaaacactacatcccatcatctttgctatatccttaaatttcaattcttcataagtgcgcaaaatcacgacctccctgttttccggtgatagttcacttaacaatttctgcaaataaatcgaattttctgtgttttgtatgctgtcattttgaatgggaagtttttcaagcgtttccctctcataagaatgattgcgttctttttgcattctaaaatagctgaaacacagattccttgcaatcgtcagtaaatatccttttaagttatattggcgataagccgaactgtattttataaatttcagaaatgtttcctgtgtaatatcataagcatcatcctcgctctgaaccatatacaagcagaatcggaaaatatctgcataatacaattcaatcaagtcacttaatgcctcctgatttccactataaacttcttgcattagttccttatctgtcatagtgtttctcccatcgtaaaacgtcttacatactatataaccattataaattttaaaaagttcacaagaaaatatttttaattattacgtttaaattttactatctaccagatgcttcattttcctcaaaatataggtgagtgtatgaaatctctcgttcaaaacagctccgaaactgtacaacaacatcattttgagggtagacggtagttaatacctccgcgatatgtaacacccaaaacatcgggtctgcacccgatgttttgaccgtaaatcaacccgaaatcatgctgttttcctgtcctctgtctgtacttttttccacaaggcagatgtgcttcttcgcttcaaaatatccctccatctccaagcggaaatgacggcaaaagcagggatactattctctaacattttcgctgtccagctttcttgccagacacagaatccggcgttttacctttgtatccactgtcagggcggtaatccattttaaccggcgtatcgtgttttcaagattttcacacccgaaagcgtataagattttcttttcttcaatgtttaacttcaagttcatacctccatcatgtttattatttgctgttctgccattttccctacaatccgttcctacccagaattttcccagcgtttctagttcctttagtatgcccctgtcatggcactacttccccaggaacggtatcacttgcggccggtcattcaattttcaatgtccttgtgacactgaaatcttaacaaaataaaccggcttctttgtaaatttatctatcatcccggatttatgcgtctgctgacagatatagaggtcagcattgaccgaatcgcagatatgcgtatccaagatataaatttagttctgaaaaaagcaaggcaatccgttatagagcagcaccagtcacgaaactgaccggactaccgccgaaccggaaacaccggcagcggacttacttaaaaatgttcccgtcatattgctggacgctctcatgcacaaggaaacagcagacgaaaaatgggcctttactatctgctgggtatttggaattgattatatgaatctttcagaagataaccgcattactcttgcatgtgtattcaaaaaatcttctgtacttccggcagccaccagccagcaaggaaaattgaagctgctgtccctgtttggaaagaaaaagccgaaagaatgacgcaaaaagagctacgttttccgccaaaacggttcgtagctctcttatattgcatatcatgattatctaagagtcagctgctatacggaaatctttttcgttgaaagagatgtgcgctatatcgcaatcaatgacggtgcggtaaagaggattttttatttatgcgttgccggaaacggacctatgcggatagcgaaaactctgaaagctgacaaagtgctgacaacacgcgcccattatgcaaagcagaaagaacttacagaaaaggtaaaggaagaacagcagaaagtagatattatatttaactttgtgggagaaattcatttgccgactgacctgcagacggaacagaaagaagccactaaacagaaaaagacggcatagcccttgaacggagctataccgccaaattgaaaactatacttccttgtaaccggaagctcttgggaatttcctgctttcattttatcagcgccttactccgccgccctttgtcctgttataggatttctctgcgcggaagatcctgatcaggcgcttttcttttttattcagtcttttttccgaacagggaagtattcttacgtaagcctgccttccatacttgatatcagcgtatacatctccgtttccttttccgttaaaatgtgaatgaactctgtgatacacatggatggactgtcctacataaacatccttatatcttcgaaatccccgtcctctgggctgattgtcataaataagaatcacgtagcagccgggaccgtcctgatacttataaccggaagtgcctctcccgcctctccaggagctgatccagtttttttcaaagtctttccagaacaacattcctttggaaataatcttattcctttttctcctgtccatgaaaaaggatgccacaggccgtatgatcgtaataaagacaaacactgccagaagtcccagaatcagatacaggaccgctcttccaggctccggaactctcatgccgattttttctgaaatattttttaatattcctatgctgtattctgataaatccatatcatcccttatcctctgaagtatattttatatatctccccatacacttctgtttttacaacagctcccccagatgtttctcgaagcatacaccttcattgcggtctgttccctcaagaatggtatcatagattgctccggaaataaatcgtactgccttttttacggtttctgcagtatccattcctttcaccatacccgcgcttaaaacagaggcaaaaagatctccggttcctgaatagcttcctccttctttttttgccgtaacccattcccagatactttcatttacgatcagatttgccatttccgcctctttgtctgcactctgcgtataaagatcaattcccgtgatcactgcttctgtatgaaagttctctgcgatcttctgtccggttttccggatttcaaccataaatgcctctgtttccaggccggacaaatacttccaccggcaatgcatttcttcttttccataaagaagaagcagcgcttccgtaagatttggagtgatcatacttgccttttctgcaagctgacgcattttttcacaaagggcttctgtataaatggggtattccatcccattgtctccgagaatgggatctgtcagtattctggtatctgaatctgcaaatctttctataaattccagagccatttccgcctgaacatcccctgccagaaatccagtataaattccgtccggacgaaaatccattttttcccattgatccataatctcttccatatgggctgtataatcatcatagtaataggacggaaatcctgtctgtgcacttaaaacagcagtgggaagcggacaggcctgtacccccatcaccgagatcacgggaatcgccgctgtcagagagcattttcccagaccggataaatcatttaaaactgcaatttttttcaaagcttttctccttaacttgcattttcctttgctgtgctatagaatatcatcaacatgtatctcaaaaaacaaccagttttgcttattttcagggggacagtttatgataaatcagcagtctgcagcaaaagaaaagaaaaaaaatcagatttttcatttttcacaaaatactgacggccccgagcttctttatctccaggtttaccaccattacagaaatctgatcacagcccggaagcttcttcccggaagccggatgccttctctgcgtaaatgttctcaggagcttcagctaagccgcacaacagtggaaaacgcttatcttcagcttgccgcagagggctatattatttccaaagcccagagcggctactacgtcactgatattgccacaaaagagcctttgccccgccagacggaaaagccttctcttcctccctgcaggtatgatctttcttcttccggcgtggaccgggaaagctttcgctttgaactctggcagcgatatctgaaaagcgctctccggcaaaaccagaggcttctcacttacggagagcctcagggggaagcagattttcgtcaggctctttccgactatgtttaccagaagcggaatattgcctgttcacctgatgatattgtagttggcgcaggagtccagagccttctgcagattctctgccctctgatccgggacaaaaaaaccgtttcctttcccactccctcttttattcagggcagcaccgtattctctgattttggtttccaggtccgataccgtaacaaggacagcggagttatttatgtttctcctgcccacatgacaaaatggggcgagatcatgcctgtttccaggagactggagctgatccgctatgccgcagagcataaaagcctgatcattgaggatgattttgaaaatgaatttgtgtatcttcaaaagcccacgccttctctgttcagcctttcgggaggacatgacgttgtttatatcggttctttttccaggcttcttctgccctctatccgggtaagctttatgatacttcccccgggactttctgagacctaccggaaaaaatccgaatattataatcagactgcttccaaagcagaacagatcgccctgtgccagtttatccgggacggtcatctttccgctcagacgcggcggttgaaacggctgtattctgccaagctgaaagagcttctcacagctgtcagagaaacctttggcccagactgcagcatccagatcggagccgccggaaccagtcttgcccttacgcttccctgccaggcagacggcgcatctgtaaaaaaagcagcgcgacttctgggactgcgccttactgttctgaaggaagaccagtctgccatcacgctgctgctttcctgctcctccatgcccacaggagacttccgtcctgcctgtgagcttttgaagcaggtgatccatagcttttaatctctccggttgtcgatcatgtaaagcagggcattgcagatacaggctgcaatattgcttcctcccttacgtccccgggccacaatataaggcgctcctgactccatgatcagctctttggactgcaccacattcacaaagcctacgggaactccgatgatcagctccggatccagcttaccttcctggatcagttcataaagacgcacaagggctgtaggagcatttccaatggcaaagatcagttttttattcagggccgctgccttatccatactggcagtggctcttgttgtaccgttcttttttgccatttccgccacatccttgtccgacataaaacagtaaacctcgcctccgtaccgggcaagggcacgtttgttgattcctgattttgccatctgggtgtccgttacaatacaggcgccgtcttttatggctgccattgccttttcgattacttcaggagaaaaacagagattgtccgcatagtcaaagtctgcgctggtatgaatacatctttttaccacaagctcagttcccggagccagctttttatctcccagctcctctgtaataatctcaaagcttcgtttctcgatatccatgggctttacattttcaagctgcaccttcatgtttctgttcctcctgttccttcttccagaatctcatatatttttttcatatccaggtgtttccgaagctctgccgccagaatatcatactgggtttccttaaaagcagcaaaatccacgccctccatctgagatacgtcaatgccttttttctttccggctgcgcggatcagggcaagagcagattcctctttgtcaaaaatcccatgcacataggttccgcacacattttcaaaaacagttccttctgttttttcctgtcccgtaactccgtctcttgtccaggtacttgccctggctccggacttccatgtgctctctcccatatggatctcatagccggtaaactccacgccggcaagaggctgataatccccttccatatccagatattttcctgttacctgggttcttgttttcttttctgcaaatacagtgtccattggcagaagtcccattcccctcatggttcctcctgcttctactccataaggatcgcttaaagattctccaagcatctgatagccgccgcagataccaaaaacaagggtgccctttgccgcagccttcaggataagagcctccattccgctttcccgaagccactgaagatcctccatggtattttttgttcccggaagcatgatcacatccggatttttcagatcagaagcatgctttacatagcgaagagacacgccgggaatgctttccagcgagttaaagtctgtaaaattggaaattcttggtacccggatcactgcaatatcaatctgtccgatttcctgatttctgtcaaacctgtctgtaaggctgtcctcgtcctccacctggatatcaagataaggagcaacgcctaccaccgggatcccacatttttcttccagcatttccacacccggatcaagaatggttttatcaccgcggaatttattgatgatcagaccttttaccatttcccgttcgtccggttccagaagctctaccgttccgtaaagctgggcaaacacaccgcctctgtcaatatctcccacaaggagaaccggcgcctttgccatttttgccatgcccatgtttacaatatcttctgttttcagattgatctccgccgggctgcctgcgccctcgatcacaataatgtcattttccgcagcaagggcttcaaaggccttcatcacatccggcaccagttttttcttatatttaaaataatctctggcgctcatggttccaagcacctcgccgttgacgatcacctgggatcccacatcgttggtaggtttcagaagaatgggattcatgagaacagaaggggcgattcctgctgcctctgcctgcatcacctgagctcttcccatttcaagcccttcctctgtaataaaagaattcagcgccatattctgtgatttaaagggggctacccgatagccgtcctgcttaaaaatacggcacagccctgcggcaagaagactttttcccgcgttggacattgtaccctgtaccataattgcttttgccatattattctccctccagaccttttttcagagcttccagaagcctttcattttcctgatgcgtgcgaaccgcaacccggtaaaagccctctgtcagacccggataattgctgcagtcccggatgatcactccgtttcggattcctttttcaaacaatccgggctctcccctgaaaaaaatataatttgcctcagaaggatacacggtaaatcccagctcctccagaccttttttcaggcagggcgcctcctcaaatattgtttttcttcctttttctacataggcattttctttcagggcagcaatccctgccatttctgccataacagaaatattccagggctgagtcacctgagccatcttttccagaagctcttcgttttcgctgaggccatagcccagccggatccccgccatggcataacgctttgtaaacgctttcagaataaaaagattatgatatctggaaagctgcgctttcagagaatattttcccggctcctttacaaagtcaagaaaacactcgtccaccaccaaaaggattcccagctctctgcagcgcctcagcacatgaaaaagaaattccctgtctgtaaggattcccgtgggattattgggattgcagagaaaaaccatgtccagatctccgtgaagccagtcaataaaactttcctgcatacaaaagccgtcttcctctctgagaagcacatgctccacctgacatcccacacttgtaagagcctgttcgtattcagcaaatgtgggcacaggaatcagggcctttttggggcgtacagcctgacagagtgaaaaaataagctctgcagctccgtttccgcagataatatgccggggatccatatcctcgtactctcccagcgcttctcttaaaggcgcatagcctacctggggatagtctcctgttctgtccaggctgtctctgactgcctgttttacactttccggggtgccaagaggattgcagttggctgaaaaatccatgcagttccgataagtatatatgtttcctccatgtacgtgtttcatgtttctgtctcctgtatgtcaattcatccctgtttccatctgtctgctgcagactccgctccgggatcctgttctttacagttcccggagtcccatatggctacagcagaatctgcaatgccagacgcagaccggcacagatcacaaggcttaatactgccgtggcgtacatcagcctgtttgcccttctgatatcctctggttctaccggacgcagactgtctccgatggtgggcttttcatataattttccaaaataatatgcatttcctgccagctggatttcaagagctcctgccattgccgcctctgtctgagcagaattggggcttgcatggttccttctgtcccttttgtagatttttgcagcatttttcccgttcattccggagaaaaaggatgctgctaccatcagccatccggaaattcttgcaggaagataattggcaagatcatcaagctttgccgcacatcttccaaaataaagatatttatcgtttttgtagccaagcatggaatccatggtgttgatgcctttataaagaaacatcacaggggcaccgcctgcggccatgtagatcataggagcgatcacaccgtcagaacagttttctgccacggtttccacagcagcctttgtaaccccttcttctgtaagggcttttgtatcacgtcccacgatcatggaaaccgcatatctggcttcctctatggttccgtttaaaagccggtcatgtaccttcatgctttcatcctttaaggattttgtggcaaggagctgataacaccagaaggtttccacagcgcatcccaaagccggaacattccggtacagaacagataagatcactgccggaatcccaaaggataaaaggcagaccagaactacttccagaaagcctcccagaagctctcctttttgggttttgggaaatatttttctgattcccttttcaagtacggcaatcaggtttccgatcaggcacaccggatggtacagccatcttggatcgccgatcagaagatcaagtaaaaaccctgctgtcagggcaatggtatgataaaacaaaatttcctcttcctgacacggcgcctgtttattggctgtgtctctgttttttatattccagacattttttcagaaacgcctccggcaccttctggtttccgtaataataaagatgaggaaaaccggccatcagggtgtctgttccatgaatacagtcccatcctctggtgccttccggcttttctgcgcggaaatcctttccgcaggtttctgaatcaaaatagtgaaattcatgagcagggatcctgccaaggtctttttctcccagaaccgtcttttgctggctcagcataatatacccgaaccgggaaagccctggtgtgcggaatacttttcccgggatcacacctgccattttgcagaatcgtccttccatatcctccatttcctcatgaaggtacataaagcctccgcactctgccatacagggcattcctccgtttacggcatccctgatctcagcttttatacactgattctgttccagcatttttccgttcagctcaggatacccaccgtacagaagaagcccgtccagattttcaggaaacctcttatcatgtatgggcgaaaacggcacaagctccgctcccattccttttaacaggttaaaattgtcctcataaaagaaacaaaaagcctcatcctctgccaccccgatccttacaggctgctcaagagtatattctgctgtaagagaaacctcttccatcgccggcgcgctttctgcaagcttcaggatcccgtctatgtccagagatttttccagcacttccgcaagcttcagaagtctgctcttcagctgcggaatctcattcggaagcaccagccccagatgccggctttcgatcacacagtcctctgccttcggcacatagcccagaacagaaatcccaagctcctgttccaccagagctttcattctgggataaagcataggcgacatctgattaaagatcactgcctttatgcagctgtccttccggtattccagaaaacctttgatataagctgccagagaaacactcatgcctttgctgtttacgatcaggatcacaggagtactggttgatcttgccaggtcataggcgcttgcctttgtggtggttccgcctacgccgtcataatatcccataactccttccatcacagaaatgtcacagccggaagcgtttttctgaaaaatccctctggtgattttttctgatgtaaaaaaggtatccagatttcttgattttgttccgatcacccggctgtgaaacatgggatcaatgtaatccggaccacatttaaaggaagctgttttcagtccccggtttacaaaagcctgtaaaagtccgcaggtgatcagcgtttttccgcttccgctggctcctgctgccagaagtattctcggtattttcatggatcgcgcctccttttatttatgagcatgaatggtgatcacataaatcggattttctcccatcatcatgtgatagcgtcccactgattttgaccgggaaactgccagctggacaacctctgtttcccaagaaacagaagcatccttcccttccagttcgcggatgcattccattgcttcgcctacagtttccaacgtaatacagttgatcaccatgcgaacctgcggattttttttcagaagaagccttacaatttccttcaggtttcccgaagaaccgccgataaacgcatgagtaggagcaggaagctcttccagcgcctccggcgcggttcctgcaacgatctccatatgatcaagagcaaacttttgtctgttttcctgaagaagcccaagagcatcctcttttttctccacagcataaacccttccctcataagctctcagcgccatttccacggaaaccgagcctgttcctgcccctacgtcatagcagacagaatcttttttcagcttcagttttccaagagagaccatgcggatctccgcttttgtcatgggagcctttcctctgataaaagtctcatccgcaagcccgtgggtggaaagcaaaggttccgcctggtcattatatgcgcacactacgctcagagcatctccctgatactctgtcagctcacaggctttttttacaaaaatcttttcgtttttataggaaagattttcccccacatagagaagtacatctcccattccgtaggaagtcagcttacgggcaagcctggctgttccgtcagcggttcccaaaatggcaaacacctttttgtgattccggatcagggacacaagattgcaggtctttccgtgggcgctgacaatctttgcatcctcccaggaaagactgatttttgccataaaatacacaactgaggaaatcccgcaaatcacctctgtgtctgttcccagaaggtcaagaagcttttttgctccactgtaaaatcccacgtcgccggaaagagcaataacaatcctctcatattccggatgttctgcaatgtactgtgcaatctcactgcttctgtactcataaaaaacatcctgatgagaaaggcgcacggcatctgccattcttcttgccccgataataagatctgctttttccacagcctcttttccctgaatggtaagggtttcccggcttcccatgccaattcccagaagggtaacgtggggcttgtatgtaaaaccaaatttttctgccagcatacgtctgcacgctccgggagaaattcctgtatcgccggagggtcttcctatgatcacaggaactgctccgcaggaaatggctgcctggattttttccggaaatcctcctgctttaccggaatcctttgtgacaagataacgacagtcatactgtctcagcattgcacggttcatttcctcagaaaagggaccctgcatggcaatgagatttttcccctcaaagcccagctccctgcaggcttctataactgaaggaagggacagcactcttgcaaaaatccgtttctggtagtccggaatttctgtaaatgctttcagttccttacttcctgtggtaagaagaactttcccctctgtttctttcagataccggacagcagcctctgtgctttctacgtaaactgcctgctgatgctcactgtcgtttctcagcacccgtatgcaggaaatctctgtattgctgcaggctgtacggatattctccgtcacctccgccgcatagggatgagtggcatccagtacaagctgaggcctttccctttttaaaagctcctccatctcaggccgggtaagacgtccggcacgcacatgaagaaactctccctcctgaagagattttgctccgtattctgtggcaacacagccaagaaccgggatctggttttccccaaggaagcggcagagtccatagccctctgtcgtaccggcaaacacaatgactttatacattccgatatcctcttggagtcaccatttttccattgatcacttttgtctgggaatttcccacaaacacggtggtaaacatatctacctttgtatcacgaagctctttcagtgtcataagatggtattcctcgccctctcttccaatcatggaaacagtaccgcacacggtttccggtgatttgtactgcatcatcagatcgcaggccttctgaagataatcgtgacgttttctgctggaaggattatagagacagatcacaaaatctgcctgggaggctcccagaagacgagcctcgattttttcccatggcgtcagaagatcgcttaagctgatcagacagaaatcatggatcagcggcgcgccaaggactgcggctccgccaagggcagccgttactccaggaataatttcaagctctacctgaggatattttactccaacctcgtacataaggcctgccattccgtaaacccctgcgtctccgctgcagatcatggaaaccactttgcccttcacagcctcctcaaaggcaagaacacagcggtccacttcttttttcatgggagtggtaagaaactctttatccggaaaagtatcctttacaagatccacataaacggtatatccgataatggcatcgctagcctttaacgcttccatggcaattcctgtcatctggtcgcagcctcccggcccgattccaactacataaattttattcaaaatgtacctcccattcccggagcgccaaagcagtggtaacaccgtcccctccggattttctttttatcagtttcccctttgccgcgcccagcacagcgcttctttcacagacattgtctgcgcctgttacagattttacaaaggctgagggagtaaaatctccctgtaccttcataagctcttctcccccaaaggtaagaaaagggagctttttcttttctgccagagccagaagtcccggctcgtgtttttttatggaaatgcttgcaagctgctccactgcctggggaaaaatatcttcctgttccagacagctgtccgccgctttttcaattccttccggctccttgtttttacggcatcccatgcccagggtgacagtctttgggatcacctggactgtggataaaaacggagtacaggatttatggacagtaactgcgatcccaagccttaccggctgttccccggcgctttcctctgtcagagcttccctgccgtaattggccgtttcctgtttttccgcaacctctcccggtgatttgcctgttctgttcttttcatccaggcttacaggaacgccttttctgtcgcagaggatcagctcctgaggcagcgttcccgtccagggaaattcactgtaaaagccaaccgtttctcctgccagaaccgcagcagatacctcctttgcagctgtcatgttcataatatcgcagccgttcttttttgcaaaaatatccactgcaaaacgttcatgaaggtcggttgcagttgttaccaccgcctgggcgttgagaatctctgacgctgtaagagcaagctcatttgctcccccaaggtgtccggataaaagagaaatcacaaattttccgcactcgtcgatcacaagcactgccggatctgatttttttgacgccacatacggcgcaatgcttctcaccgcaatgccgcaggctcccacaaacaggatcccgtcatcggcagaaaaacggctttccgtccattttaatacggattcctgaatggaatcctttaaatatttactttttgacgcaagcaaaaccctgtgtccctgtttctcaaattctgttttcagccggctggctgtttccagtccggtaagactgaagcagattatggaaagcttcatgtttttctccgttttattttgtggcttttctgaattctgtggtaaatgaaggatcgtataatttggagcggtcataatccgctgcgtttaccgcgtctccaatgatcatcagagctgtttttgtaatattgttatctgctgctgtttttgccagagttcccacggtacagataaatttcttttcgtccggccaggttgccttatagacaatggcagccggagtatcttcccgataaccgccctcgatcagtcttcttgacagctcttccagcattcccgtgcttaaaaagatcaccatggacgcctgatgagccgcaaaggactgaatgctttctttggacggaaccggagttcttccttccatccttgtaatgatcacgctctgagaaatctcgggaagtgtgtattccagattcaatgcgcttgccgcgccgcagaaagagctgacgcccgggcaggaatcataggcaattcctttttcatccagaatatccatctgctcccggatcgctccgtaaatgcagggatcgcctgtgtggagacgaaccgttgtcttaccttctttttccgccttttccataacagaaatcacttcttccagcgtcatctttgcgctgttgtagatggtgcacacatccttactgtattccagaagctggggatttaccagagaacctgcgtaaatgatcacgtcagcctcctccagatactgttttcctctcactgtaataaggtccggcgctcccgggcctgctccaacaaaatgtatcatctgttttctcctttggatatttttttgattaattctgccgcatgttctgtctgtcccagatatccgtattcactggaaaaaatcacagcgcccagaaggatctggtcataggaacggtgatccagataaaactggatccggtctgtgatttccttcatggtttctttcaggatcctgtgcctgtccagaacagcaagcgcctcgtctgtggtattgcagttcaggatctcctttgcacagccaaggccagcccccgcacggatggcccctgctgcaagaacctccattctcccgtccgcactgtgagaatgagtgttcatgatccctgctgcaacttttacaaacttgccgatatgagatacaaaaaggattcccttcactcccatatccacagccatatcaatggtttctcccacataattgctgcatttgatatttttttcaaaaggaagcgtcatatgctcccttaaaaattccgcgccgtagtttcccggagttgccagaatatattcttctcccattgccgcatgctggctcatttctattcggatgctgtcgatcagcgccttctcactcatgggctccacaattcctgtggttcccagaatagaaatacctcccacaatcccaagtctgggattaaaggtttttccggcaattttttctccttcaggcacagaaatggtaattttcagtctgccttcataatcaaatctgtctgcggcctcctccgcagatctgaggatcatggcttttggaaccggattgatagcagcctcgcctactgcctgtttcagtcccggctttgtcacccttcctacaccggcgcctccgtcaatgacaatccggggctcaatggcttcgccgtccagcttttccaccgtagcatacaccagaatcccgtttgtagtatccggatcgtctccggcatccttttgaacagcacaggtcactgcgttttcttctttctgaatgtcaagaagttccagattcagaagaattccctttggcgtcatgagactgatctcacggatcatttttcctccaagaaggatttctgcagcgccttttgcagctgctgccgcacaggaacccgtagtataaccaaagcgaagttttttattattttttgtgatataataatcttccagaccggttttatgaaccataaatttcctccttatcaacgcttttcattatataattttgcgtgtaaaaagtcaatttttctgacagctttccgggaatatatcctccataaccgttgttgttttcttttattgtaattttatttcttctatcttgcagcggtgcttttttgtttctttatcatagccgattcccaccagaagaacccttcggactgctgctctttgatgctcaggcgcattgccgataaagcggagcgtatagtttttccctgatctgctcaatggcttcctccggcgtgtttattttcacagccctctgcgcctttccgtcatttaaaaaatccctgtcagcttacacactgcaattcccacagaaaaaactgcaattcctgttttcagaagcttctgattgatcctggatgcatttttgctcccaaaatatacaccgactccatgagtaagaagagcgatcagcagaaccggaagaagctttttgatatcacactgggcaagatatcctgtcactgccggaataccgataaagacagagttaaaaagcgccactcccactgcggtccgtaccgaaattcccataaccaccagaagcggcatcacaagcaccgggcctcctgcccccgacatagagcagatggctccggtcactgccccgagaagtaaggttacaggcagatttctttcaatggaaaagccttttttctttttatcctcaggctttccatcctttcttacaagaatggagattccggaaagaagcaccaccagataaagaatcacttttacctgttcctcgggaatgatcagattcagctttactcccagtatggctccgatcagacttccgatactgagcttcagcccgaattttacatcaaggtttcctgcctttttataattccaggagcccaatgcgccggatataataaaagctgcaaagctcagcgccagcccctctgtaacgctcattcccaaacctgcagtataaaacatgggaagcagaaagccggccacgccgcagaggcctaccaacgcgcctaccacaagattggcagccgctgtcatcagccagatacccattacagaacacctgcctttttcatatactgatttgcctcaaacaggattttttcctcatccagagtttttatctctctgttttccataagaatttttcctcctacgatcatctcactgacatcccctgcctctccgcactcaaacatagtgtgaataagatttccactggggatcagccgcgctgtctccagacagatgccgatcatgtcagccttacagccttcctcgattcttccgcactgtcccatctcatctacagcggctgccccgccctcgaacatcattcggaaaagcagctctgcaggcataacttttgggttatgtttgggaacaccatggtaaatattcataagagaacggaagatcctcatttcattccacaggcttaaacctccgtgggctgctccgtcacttccaaatcccggtatgattccccggtttaccagatcaggcgtatccggaactgcttttccgcagttactgaacggacagtgacagatttttacctttttttctctgataagctccttttcttcttccgaaagaatcagactgtgagcgcccagaaatctttctgagagcacaccctttttttcaaggtattcatagggacggattccttctctttttatgatcccgtctacctctccctgatattcgttcatatgagcctgaagcattgcgtttctttccccggcatgagaagcagccagctccaccagctcatccgagcaggagtttaaagcccggagcgcataataaaccttcaggtttccttttccgttccaggtatcataaagccggtctgtctcctttaccgcctgccgggcattcatggaaatgctttccggaagaccggcttcatccattgtggaaacggaaagacagcctctcagtccgcttttttcataaacctctgccgccgcgtacatataatagctgcctgcatccacaaaggaggtggtgccgcaccggatcatctccagagctgctgtttttgcggaaagtctcattttttccggtgtcagggtactttcaaaaggaagcatgactcttgtccagataatcggctttgcatccagaaccagcccttttaaaagctgctggcctgtgtgcatgtgactgtctgtaaatccgggcataaaaagctttccttctccccggatcaccttctgcgcctgaacctcctctgttcctttttctgatacaaaaaggatcctctccccttttatcccgatatccattcctgtttttactgtttcataatcagtcattacaactgtattttttatcagaagatcacattttatcataaacatctgctccttttaaattgcgcctgtaagcttcagaatcagggaatcccagatacaggagccaaggaaggttcctgtcattaccagaagacctaccagaaggatcttcggcccctgtttcacaaaggttttcagctgatccccgatagcaagtccggcataggctcccaccatggtaaacggcgctgtaaaattgatctttgccgcagcatcgatcacaaaagtccttaccggagataaaggacaggcagccagaagaccaatgatggcacagtaggcaacaatgggaagcttcagagggatcacctttgtacagacaactgcaagcatggaaataattaccagcaccgccagcccgggaagggactccataaatcccacgtcgtatccgataaagtttgcaagtccggtaccgcaggcaccgatcaccagaagaaacagccattctatgtatctcatatcctcttactcctttccagccttctttttgcgtccaaagtgaccaagctttggttccagtatctgatacagtttgtcgcaaaggggaatcgcaataaacatgttaatgtaaattcctgttattcctgccatggtttctcccacactggcaagcgttttaatggattctgcaaaatcaggatacatggcgcagagagacgcgctggagcttgccatcatgattcccgcacccacacctgatgccagtcccattgcctcaggatgaaaaagtccggtcattgccactgcagatgccaggattccaaaataaatggttcccaccattccgccgacaatataaatagaaagacttcctcttgcctcagcagaatctgcgccgtaaatattattgatcagcgccatatgatactcacggttaatggaaaagcaggctcccaccgcctctcttttcattcccagaagaatagcaaccggcagcgcaaggaaaatcccaaaaaggtttccgaagccatggagcagaactgcaggaccggcgcttaaaattgtttcgatattggctcctgctgtaattccaagctttacaataaaaggcgcaattccaaccaccaccagcttggaagctgcttttacatgtttgttttctacgatcttcagtacctgaggaccgcttaccacgcccagaataatggcataaaagattgggaataaaataaacatccctgttcccactggaattttgatctgaccgatattatctgcgatcagaacaaaaagaaatgccagaaggtagattttccattctgttctgattctttgtcccagtgactcataagcaaaattttctttttgttttttcacgatttctcttacctcccgttccgttttttgttatttttatcttatcgaaaagggctgacagaaaaaaggacatttgaggtgtttttgtgatttatgaacagttttttagaaaatgggaagaggaaaacggtagaaacgctcacatctttgtgctataatttttctaacacacagagagcgacgaactcttatttacagagaagataataaaatgatttttcattatgcgtgaaaatctttatgcgccatgcacttttactggtatttatagaaatatatttttttacacttctattacttctttatggaatatacgcaaaaggagaatgtttatgacagtggaagatctggaaaaagaaatccccggtcttatagaatacacagaaaccatgcctgaggaaatacgaaaaaaggcctttgtcaaggtttatcctccgggaaagctgatccaccagaaggactgtgagcttcagtttttcggcattgttgcaaaaggtgaaaaccgggtcattaatgaatttgaaaatggaaaaatctatatgatcgaaacaaaccgggccattgattttatcggggaggtaaccattctggcggaaatgccccgtacctctgttaccatagaagctgttacagagtgtacagtaatctatatttcccgaaaggatgcagaaacatggatccgaaacgatcagcatattctccggctgatggccagaagaactgcctttaaattgtatcgttcctcctacaacaacggcctcaagctttattaccctcccacatttctgctggcagattatctggtaagagcatatgaaggttctctttctgaacagactgatactgtctttccggaaaacggagcctttattctgcagaaaatacgggaacgcctcagtgaagagcttggcatgaatatcaaaacactggaccgcaccatccggtccatgcagaaaaacggatattttaatctgacaaaagggaaaatatccttcggatatgaagaatacataaaaatgaaagaatttattactacagcaaaggggtgatcaaaacccctttgctctttttttaatcaatacaaaataatcggatatccgctttcaattgtattgtagatcagtgctgcctgatctgtgggaaggtttacacacccgtggctgcctgcgccggttttatatctgttgccgccaaaagaagactgccaggaagcgtcatgaagcccctgcccgtaaacaaaaggcatccagtaatttacctttacatcatatccgtaaacgtcactggtcagattaaaaggacttgccttataggggatgggccacgctccgcggtaggtttccctgtccggtgtgggagcgccgctgacaatatcggtttctgttaccagtgctccgtccttataaagccacagatgctgattgtccaggctgacttctatgtagctgcctgcaagatcgtcttttccgtttctctgaagtccccggatactgtaaacaggctctctggaaatggctgttcctgttttcagatcttccagaagctgtttcagctctgcctcctgatcaatgcggaagccatactcatttccggatacggtaatgtcgtttccgtaggaggtgcggaaggtacggggcacataaatcgtatcataatctgcagccagctgctgtacccaggcttttgccgcagcctcatcaatgctgatcttttctccttcgattttgatccaagaactgatcgcagcagaatccagaacctccgttgccgggccaaaggtataagtaactgtggtgcttctgtattttttcagctgaccgttcagcgaatccagctttttctgcagttcctctgacactacggtttccggctgaacataaacagaggggcccatttctattttaatctcactgcccagaagatcttccggaaaagtggtatcaagaatctgatctacatggcttatcagccggccttcgtcaatctgatctccctgcacgtcctttaccataacaaattgctgtttctgctcttcataggaaattgatgcgctgacagaagctgttctctctttattgttaaagcgagaagcagaaagcgctgctttttccttttcctgatccttctgtatctgatacccgatacggaaattcaccggctgcgctatgatctgtctttctgcatctctttcctgtttaatagctgtcaactgggcattcagaacattttcatccagagaatatcccagttccttcatggacgtgcggtaaacctcttttccgtcctcataaaaggtcagttccctgctgttaaaagcatccatgatttttttctgagcctcatctacagtaagtccggatacttcctgctgatagatccggatttcccggcccagagtatttttgtcaaccacatatatgtaaataaaaaatcctgctgtaatggcaactgccgcagtcaggcatatggcaagaatgatcttcagtgttttcctgttcagtctgatttttttgttcataatccctgttcctctgcatcttctgtatttaaagcctatgatttcttcccggcattctattcccttcaggacagaatctccagtttttattatagtataacagatactacctgtctgtaatctctgattttaccctgtctgtcccggttttttggtacatatgccaaaacgtcttacgggatagcaagctgtaaacaataagtgtacagagcttacattacctgtacgccgcttctaagtctcaccagcttttcacccataaccggcttcatcagggcaaaggcctcgtctccggtacaatgtcctgtataaaaaaccgtctcatactctgccagctcttttgccgtttccaggatcaggcttttttcttcctctgtatatggtgtttttttcatcatgtgaaagccgctgatcaccctcgcaggcattccgccataaatttcccggtatctgtccagtatatttaaaatgccgttatgagcgcagccggaaaccagaacctgttcctttccctcttttatgaccaggcactgttcatgatcaaaggtatcctgctgctcttttccattgattttccgggtaagaaccagattgctttggggaaaacaccgtctccctgtaatgttggaaaaaagcgaaacttccccgtccagaaccctgtctccccggatcatttccacctgaggcaaatcggggatccgtctgtcaatgccaatatatctttctccgtgataaaaatcccctgtggctttttgctgcatatagattcttgcatgacgattcttttctgtaaatgtaagaatcccgcctgaatgatcataatgaccgtgacttaaaaccaccatatcaacagagctgagatccactcccagcttttctgcattctctgcaaaggctcccgtagcccctgtatctgccaggattttatgtttctcagtttctatataaagagaaagcccatgttcaaaagcgcagccttcttctccctgtgtattttccataagagttatgatcctcacaagttttcctcctctgatttttttatcattatacactattttttttaaagaaaacagacagaccactgtaaaaatgatctgcctgtgttttatgtactgctgtttttctgttaaagcccctgattcaggcttttttctttttttcatagtctttcagagcatcaatggcttttttggacattgggaacagaataaagatattaaataatgtcataagaccgactcccacatctccaaggtcccataccacggtataggcagccagtcctcccacaaacagcattaccagggcaacgatcttgtaggcggtctgagaaaaccagttgtcgccaaaaagatacgcaacgtttgatcttgcatagaacaggattcccacaaaagtggaaaaactgaacagccataaagtaatggcaataaatactactccgaacgtaccaagatggtagcgcattgcctcctggagaagatccattccggtaagcccctgcgtgagagtttccggtgtaagaagcatgatcatagccgtacagctgcagatcagaatggtgtcaataaacactccgagagcctgtcccagacctacctttgccggatgatccgtctctgctgttgcagccgcgcagggggcggaaccggagcctgcctcattggaaaacaatcctctcttgataccattcataagaacagcgccaaatccgcctgccacaacctgacggaaaccaaaagcctcctggaagatccttccgatcacagacgggatcatgcggaaattgatcacgatcagaagaacagtgatcagaagataacagcctgccatgatgggaaccataacatccagaacctttacggtggcatttttgcgaagaacgatcaccgctgccagaaccaccagggcaatagtgctgtataaaggcggaatatgaaaggcattctcaaatgcagaagatacagaattactgatcacctgactgattccgcaccagcagatcagtccggaaatggcaaacagtacagaaaggccacagtatcttctgaccttgccgcctcttttttcctgaagatatttatgtatgtaataggccgggcctccccggtatcctccgtacagaggatccttttctttataaagctgcgccagtgttccttcgataaatgcggtcgaagatccgatgagggctgttacccacatccagaacacagctccggctccgcctgcagaaatggctgccaccactcccaccaggtttcccattcccactcgtgtggcagtagaaacgatcagggactgcatgactgacagagaacccttttcttttgtttttttgcctgtaaccgcttttaccatatccggaaacagacgaacaggaagaaaccttgtgcgtaccgtaaaataaagcccggccggtatcagaatgatcacaagaagagaaagcggaagctctcctcctccgggcaggggcagtacgatcagatctccccataaaaaattataaacactctcaattattttaacaatccagtctcccataacccctccatttttgttgaatagtcatatgattcagtatataataaattacataatttgagaaattgatagttttaataaaaagtattgaaatttttgataataacacaggaggtttttatggaaatcagaaatcttgaaagttttattcaggtggcagagcttggcagctttacaaaggctgcagaaagtctgggatacacccagtcctcagtatccactcagatccgtcagctggaaaaggagcttggcatccctctgtttgaacggatcaaccacagagtccggcttacagaaaaaggaaaagagattctgaatcttacccatgagcttttccgcacggcagaggccataaaaaaaacagcggacaatccgctgactctttccggccacatccgaattgccactgctccttctttatgtcactggctgttccagaataattttgaacagttccaccggcatttccctgatatctccctggaggtcatcagcaccagcacagaagaaatgttccggcttttaagccagaatgaaattgatcttgtgtacactctggatcaccatatctatgacagaaactatgtgatcgcctatgaggctcctgtttcctgccattttttctgttcttcagctcatcctctggcatcccgggaatctgttcctgtaaaacagctgatccatgaatcctttatccttacagaaaggaataccagctatcagaagcttctggatcagcacctgaccagtctttctctggagatcactccttttctggagctcagcgataccagcctgatcacacagatgctgcaaaaagggttggaagtctcttttctgccggattatgtggcggaaacagctattcaggaaaaaaaactcgcccgtattcccgtgccggatctgaatatcgaaatctggaaacagatcctttaccacaaaaacaagtggatttcgccggaaatacaggcggttattgattacatgggaagggaggtctttcagtaagacttatccgatctcataccatttgatttcatttgcttccatgtgaagatcaaagctgctgccgtctccgcggaaaacagtagtatcctgaggctcataagtgttattaaccacacagtatttgccatttttcacataggcgtgaacctctacgttgtagttggtggaataccagcagttcagctcttcctctgcagatgcggaccagagcactgcgcggtaaagcacacggctgttctcaaagctgtacggcagaccgctgatgtaaacgccgcgtccctttccaaaggtatttactgccatctgtacttctttgtccttctggatcaggatctctgtatccggaagtgcaaagatgttctttttgccctctccaaaatccacttctccggtacagtccttcaggataaaatgatctctgtgctcgtcccaattgtacttgtctgtatttaagttaaatcctctctcttcttccacaccgagaatgtcgtcaagctggaagaatttaccctgccactgatgagcacccggctctcctacgccgataaagccgccgccgttataaacaaactcgcggactgcagtgcttactgtctcatcgatccagtattctccgccgctctgggcagtatctgcgtcaccgacattgatcacaacgtcaaaattcttaagaagcgccggatctgccttgatgtcctcgaaactgataaaggaaacgtcaaaaggagcgccgcttaaagcctcaatgattccgaagtaggaatagttctgtttgtagtaaaggccatgatggaccatatgattaccccatgcacgcattttaccccagcagtttaagacagccactttctttacgcagtacggagtgacaccctggatattgtcgtaaagagtacggaactcctgacacacttctttaatataatccacaaaatccgggaactgaatggcaagcttcagatatccgccataaccgattctctggatcgggcttctcagaatggctcttcttgcagttacccagtttacttttgcttcttttaccggatctccgccttcatggaaagtatccgggaagaaatacggaaggaaacgtccctctgtatattttacatgcttgatatcgctgaaaagacgaagtgttgcgccatttccaacgcttccaactactgcgtcaagtccaatctgggcaaattcatccataaacggctccatgccgatccagtgatcgcccatgaacatcatggcttccttgccatactcatgaacaatatctaccatctcttttgcaagaagggcaacctctctgcgctggaatgcctggaaatcacggaattccttagaagggatgcgatatgtattattcatatatccctggtcgataatgtattccggacggaacggatagcctgcttccttttcaaactgttccaggatataaggacttactgatgcagaatatccgtaccagtccacatatttttctcttgccatctcatcaaagatcagagtaaactgatggaaaaatgtagtaaaacgcactacgtccacatactcatgggtttccaggaaacggcggagacgtttcagagaatactctcttgtggcaggctgacgcacatcaaaggtcatctgcggctccacatccttccagtcattgacaactgcattgtacatatggaccggatcccacataatatatgcaagaaagcttacggtatactgatgaaaaggaactgcctgaatcctgacatttccggtctcttcatgataagaccatttttcgcatggaaccggctgtcctgtggtgcggtccataacctcccaccatttgcggatatcatctcttgtatttacagcaagcatatccgggtaaagatgatccatcaggtgaatttccagagattcttccactgctgtgtggatggatgtcataatatacatctgctggatctcttccggatgcgcttttgcccagtcgttatccttacgtgttgtgtaataagttgcatagatcttggatccggtatccttcagttcctgaggaaactctgttccgtcacagtcacggatggcatctgcgccccactctttcataatatcaagtgtctctctgatcacgtccagatctgtaggaatcgtgactcttcctcttttttctgccatgttcatacctccatataatttgtgcaaaaaactccctgtacatacgcttagttttttcattatgattatagaataataattcctgcacatgaattcaattctctttttgctttgttttttagaaatcttgctgtaagaatttttttatgatatgataacagaaactgcggaaaggagtttttatgagcaaccagtctcttcatttttcatcagaaacagaaacttccatgaatgctgtacttatttcagcctcagcctcacgctatgagggagactggtccagcatcccccattcccacacttttacagaacttttttatgtacgggagggcaaaggaagctttctgattgaaaatcagattttccctattgaaaaagacgatcttattattgtcaatccccatctgagccatacggaaatttccaacggaatctctcctttaagttattttactgttggagtggacggaatttccttttcttttaatgaccaccgggatttccagatctttaactgcagaaaaaaacaggcggatcttcttttttattttaacgcgattttccaggagctggacaaaaaggcagaaggatatgaaagcatctgcatgcatcttctggaaatccttaccctgcagctgaaacggcttacagattctgcctttgaagtcatttcttctcagcaccccagccgagcctgcgctgctgtaaaacggtatctggattccagttacagcgaatccattactctggatgatcttgctgttttcagccatctgaacaaatattatctgagccatgaatttacaaaatactatggaatttctcctatcagttacctgaaccggaaacgaatcgaggtgtgcaaagaacttctggaaaattccgattatggaatctcagatattgctcaccaggccggcttttcctctcagagctatctgtcccagagcttccgcaaatactgcggtatgtctgccggaacctaccggaagcttataaaacagaataaaaagcagattacttctgactccggtgcccaatatacagaaaaggaagcaggaacctctctatgaatcgatcagtgacctaccatataacagaagcagatgccagcatgcagattctggattttctgcgttcaaaaggtttttccagacatatcctttcttccatgaaggcagaaaaaaacgccatttctctcaatggcgaaaaagcaggaggacgtaccttattaaaaaatcatgatattctgaacatcctggttccggaaacaggatccacagagcatataattccggttcccatggagctttctgttttatatgaagatgaagatattcttgctgtggacaagcctgcgggaatgccggtgcatccttccatgggaaattacgaaaatacactggcaaacggcgctgctttttattttgaaagcagaaatctgttctgccccttccgctgcatcaaccgtcttgacagagatacctccggcgctctgatcctggcaaaaaatcctttaagcgccgccatcctctccactcagatgaaacgccgtgagatccgccgcacctatctggcagtggtaaagggaattcccccggaaaaaggaaaaatctccgcacccattgcaaggcttggagattctgtaattcaacgatgtgtagatttcgacaacggcgaatctgcagttaccttttatgaaaggctggataccagaaacggtcactctcttctggagcttcatctggaaaccgggcgtacccatcagatccgcgtgcacatgggatatctgggctacccgcttccggcagactatctgtactgtccggactacagccggttcagccgccagcctcttcactccgtacagatagaattttcccatcccataaccggcaaacggctatgtttcacagcgcctgtgcctccggatatggttcagggatttttatgatctgtttttttcgtagatcacaagaagtcccttcagaagaagattcgcatcccagatcatttctcttttgcagtgaggaatgatcttttttgacattcccccggtagcgatcacggttacatcctgtcccagatactcttcgatcctgtccacaatgccgtccactgccgccgcgtttccataaaggattccgcttttcatacagtccactgtgtttcttccgatcagtcgtttaggctcttctatactgatgccgcttaactgggatgcccttgccgtaagagcgtccagcgaaacccttactcccggaaggatcatgcctcccataaaccgtttcttttcgtctaccacggaaacagttgtggctgttcccatatccacgatcaccagcggcaccggataaaaggtcatagctgccactgcgtcagccacccggtcagctcccatttcactgggattatcaagcataatgttaaggcctgtcttcagcccgggaccaaccaccatcacatcctttttcaggatcttttctgcagcaagtctggctacatttgtgatctggggaacaacagaggaaataatacatccctcaatttcctgccccttaatgtgataaatatcaagaactgttttcagatcaatggcatattccagttctgtttttgtacgaacagtagaaagacgttccacaaaatatatcttttctctgtctatacatcccactacaatatttgtatttccaatatcaatcgctaagatcattcttgttcattcctttatcagatactctgtttcaccgcaatctgagatgccgggatcagccttgctctggaaagcgctgttcccactgctccggtgatcattgtagatgccgccatttcgcagactgcattaatacccacaaaagcacagcagaacaaaagtacgttctgccctccgatcagctctctgatatattctgtatttccgaacagtcccacaagcgctgtcataaaaaatacagtgtttaaaaacgctgagaagaagccggttactgcgcaggacacataaatatttgcttttttccgtactgctctgaaaatatatccgatacagattccggtaagaagccttggcagaaacctctgaagaaaagcaagcacagggctgatgccgaacaataccgcgcccatagcgctggttcctccgattccgatacactgtccgaagctggtcagtccgaaaatggctccggccactgccccgcctgcgggaccaagtaccacggcgctgacagccaccgggatcacattaaaggagatcgccagaggcccgatattcagatagcccagaggggtgtatgccataagcagaagaacccctgacatcagtcccagtacagtaagctgtgatgttgtgaatttcttttttgttttcattttttcctccttgttatcgttccctcctacagggatacaatacggtgcggaactgcgggcggtaagtgtatttgcccgcttcctgataaacgggttacacttccctttctttgcagacagaaaggattttatccagaatggcgttggctgcatcctccttgctcatcagctgaagtgatacgtcctcattctgtgtaatcagggtcaggatattggtatccccctggaatccggcgccggcctcttttaaattgttggctgccaccatgtccagatgttttttctcaagcttggccctggaattaccgatcatattctgtgtttccatggaaaaaccgcataaaaactgtcccggatgtctgtgctctcccagatatttcaggatatcgtctgtcctttccagctcaatgctcatttctccatcctgtttttttaccttttcgtcagctacgtgaagcggacggtaatctgccactgccgcagccttgataataatatcctgttcctcacttactgatgtgactgcctcaaacatgtcccttgcagtgacaacaggaatcatttttacaaagggcggagccgcaatggcgcagggaccgcttaccagcgtaacctcagctccccgcagcatggcagctctggccagggcatatcccattttgcctgaggagtgattggtaatatagcggaccggatcaatggcctcctgagtgggacctgcagtgacaagaacttttttgccctttaagtccttctcacaggcaatttctttcaggatatactgtaaaaggatttccggctccggcattttgcctgctcccgtatctccgcatgcaagatatcccacagccggatcgatcacttcataatcgtaacggcggagaatcttcagattatcctggagaatgggattctcgtacatattggtgttcatggcaggagaaatatactttttacatttacatgccatgaccgtggtggtcagcatatcgtctgcgattccgtgtgcaagctttccgatcacattggcgcttgcaggggcgatcatcaccacatctgcctgttttgcaatggacacatgctctacctgaaactgaaagttccggtcaaaggtatccaccagacatttgtttccggtgagagattcaaatgtaatgggattgataaaattcgtagcattctctgtcattagtacatgaacctgcgcgtgcagctttttcagcgcactggcaagatatgcgatcttatatgcggcaatacttccggttacacccagaagtactgtttttccctttaacattccggtttcctccctttcatggcctgaacagaccaaagcttttttacctgtccatttattttaccaatcccttcttttaattgcaatggatttttcctgtgtttatatttttatacacccttgatggtggcattttgtactgtatataacggattccggcatatatatcagtctcccttttggcagctcgggcttatctctgctctgtcactctgtataaaaaaagtgccaaccattacctggcagtaactcttttatggaaaataactcttctgtaattgaccttgggtgtgttttttcttataataaatgcaaaacgataaatgaggaaataccggattttagcacggaaaaataaacggacaccaaaaattgccggaaccgatctgtctatgatacgtggataaacagaaattactttgtgcgttttttgaatttgctcatttacagtacagaaattttttacaaaggagacttcacaatgaaagactataccgaatatatcattcagcaggcgcagaaacttctttccattgacagtccttccggatacacagaacatgtatcccagcggcttctggaaacctacagagaaatgggatatgatccgcagcttaccacaaagggcggcgttctggtgcagatctcccggggcacagaggaaaatacagaggatcctgcaaagggacctgttatgctgatggcacataccgacacactgggagccatggtttcttctattaccggcgagggtcggctgaaactcagtcctttaggaggaatgaatgcaaataatgcggaagcagaaaactgccgtatcattacaagagagggaaaaacctataccggaactttccagttatgcaacgcctccattcacgtaaacggagaatacaatgatacaaaaagaacctacaaggacatggaggttcttctggacgagctgataacttctgccgaggaggtaaaagctcttggaattatgaccggagacattgtctgctttgatcccagaacagttgtcactccttccggctttattaaaagccgttttctggatgacaagctgagtactgccattcttctgggctatgccaaatatttaaaagatgaaaatattactcctgaccgcaggatctaccagcacattaccgtattcgaggaagtgggacacggcggctgcgcttccataccggaacaggtaacagagcttctgtccgtggatatgggctgtgtaggggaaggtctggaatgtacggaatgtcaggtttccatctgcgccaaggacagccggggaccttatcattatgatgttgtttccggacttatccgggctgccagacaggcggatgtggattttgccgtagatgtatacccgtattacggttctgatgcagatgcagctttaagcgcgggagtggatgcgcgccacggtcttatcggtccgggcgtatacgcttctcacggatatgaaagaagccacaaaaaaggtgtggaaaataccttcaatcttctgaaaagctatcttggataatttggggaacctgtatctttccctgacaaccagttattaaaaggagacacattttatggattcctgtcagatcacgcaatggtgcgcccggtttatccgggaacaggtaaaacccggagatctgtgtattgacgccaccatgggaaacggaaacgacaccctgcttttaagtacactctgtaaagaaaacggacaggtactggcctttgacattcaggaaatggctcttactaataccagaaagcgcctgcagtgtgcaggcgctcccgaaaattatcagctgatccttgattcccatatcaatatgggcagctatgcttctccaggatctgtcagctgtattgtatttaatctgggctatcttcccggaggagatcattccctgtccacaaaggccgaaaccagcatccaggctctggagcagggactctctctgcttcagaaaagcgggctgatctccctttgcatttacagcggaggggactccggatttcaggaacgggaccaggttcttgcctggctttctgctctggatcccaggaagtatctggtgatccgcagcgattattttaaccgtcccaataatccgcccatccctgttcttatcataaagctgtaagcccgctccaggtcttaaagaatatcaatatattctccgttcagagccttgttcatgcttcgtaccgcgcagaatttcccgcacatggaacaggtatcctcatgctccggagctctgtcatcccggatgcttctggcagtgtccgggtcaatggagcactcccactgtttttcccagtcaaaggttcttcttgcatctgccatggcatcgtccatgtctcttgcatgaggaactttttttgcaatatccgctgcatgtgccgcgatcctggatgcgatgatcccctgcttcacatcctccacattgggaagggccagatgctctgcaggagttacgtagcagaggaaggcagctcctgctgaagctgcaacggctcctccaatggcagaagtgatgtgatcatagcccggcgcaatatccgtaacgatcggtcccagaacataaaagggcgctcccatgcagatggactgctgcagcttcatgtttgcctcgatctgatcaagaggcatatgtcccggtccctcaaccataacctgcacatccttttcccaggctctctttgtcagctcacccagacggaccagctcctcgatctggcatacatcgctggcgtctgccagacagccgggccggcaggcatcgccaagagaaatcgtcacatcatattcccggcagatatccagaatctcatcataatactcataaaaaggattctcctcccctgtcatgctcatccaggcaaaaacaagagaacctcctctggatacaatgttcatttttcttttgtgttttttgatctgatcaatggtctttctggtaattccgcagtgaagagtcacaaaatcaacgccgtcctgtgcatgaagtcgaatcacgtcaataaaatcctttgcagtcaaagtagaaaggtctctctgataatggatcacactgtcataaacaggaacggtcccgatcatagccggacattcccggatcagttttttgcggaaaggctgtgtgtttccatgagaggaaagatccataatagcctcagctcccatgttcactgctgccattaccttttccatttcaatgtcataatccttacagtctctggaaactccaagattcacattgatctttgtacgcagcatggagcctactccatttggctcaatgcaggtgtgaagtctgttggcgcagatagccacctggccttttgcaacaagctctctgatttcttcctctgtgcggtactcttttgctgcaacctttttcatttccggagtgataatcccacgtcttgcagcctccatctgtgttttatattctctcataaagcgtttcctttccgtgtctttatttttgtaatactgattttattcatttatatctattttctgttttacagatttgccatataaaaagcgtgatccagagggccgcttccctttcccaggtccagtccggcttccagagcctttgaaatatattcctttgcttttcttaccgcctcttccatttccattccctttgcaagattggatgcgatcgccgaagaaagggtacagcctgttccgtgggtattgggattatggattcttcttcctctgatccagatcttctgtccttccacgcagagaagatcgtctgcatcactgatactgtggccaccttttaaaagaactgcctctgcgccaagatcactgagcttttctgctgccgcctccatatcctgtttattctttatctcacagccggaaagaatttctgcctccggaatatttggcgtgatcagagacgcaaggggaaacagctcttttatcatcatctctgccccgttatttttcatcagggaggagccgctggaagccaccataaccggatccaccaccacgttttttgcctgataaaaccgaagcttctctccaattacctgaatcagttcttttgaagataccatgccgatctttactgcttccgggtaaatatcttcgaataccgcatccagctggtctcccagaaattccggcggcacctccatgacagagcgcacgcctgttgtattctgggcagtcagggccgttatggcgctcatggcatacacgccgtttgtgatcatggttttaatatctgcctggatcccggcgcccccgctggaatcacttcctgcaatagtcagagctgcatgaacgctcatagatttaaaacctcctgtatttttttcttcagaagagccgtttccttctgtatatcctgagcggaaaaaatcccggatactacggctgcccctgccattttccctcccgcaagctcttctatattctgcctggtgatcccgccgatggccactgccggaacagaaaccgcgctgcagatttcttttaactgatctcttgtaatacgaatggcatcctgtttggtaggagaaggaaaaacagctcccaccccaagataatccgcgcccccctgttctgcttttttggcctgctctgtagtttttgcagtggctcctatgataaaatcctccggaactgttttccgtatgtcagaaaccgccatatcctcttttcctacatgtacaccgtccgctccgcttaaaagcgctgcctttacattgtcgttaatgatcagaggaacatgatagctgtggcagagctcttttattttttctgcttccgccacaagccgactttccggcagatccttttcccgaagctggatcatggtcgctccgcccttgagagcatcttcaatctgttcgtacagggtctgcctgcccgtccattttctgtctgtcactgcataaagaagaagcatatctttatgaaatttcatgttgatcttttgtcctttccccttattcagaatacaaagctctgtaaaaatattttttctcttttattcctgtcttttaaactcctgcaaataatcctccggatcttcgcagaccataagcccgctcataacacaggctcctgctgccccggtctctcttactttactgatattggcaggagagataccgccgattgcataaacaggaacggaaacacctgcacatacgtttttcagaaaatccagtccccgcccgggcagtccctttttacagtccgtatcaaaaatgtgccctgccgtaatataagtacatcccagtttttctgccagtaccgcatcctccacagaatggcaggaggctcccagaacccgaaagctttgccgtttgccgggttccattttcatgagaaccggaagcggaagatggagactgtcacatcccagctccagagctgcctccggaaagctgtgcagaatacaaacggtttcctgttccctgcatatgttcagaattttttccgcaagctccatatattccttttccaaaagctctttttctctcacaaccaccgctgccggatgagcggctgcgatcttccgcatcctggtaataaagtcttcccggcagagcttcctgtttgtgatacacaaaatatctgagttcctgttttctttatacatatacataatcattcagaaccggctgaagcccttcctctgcaatgtctctgtacatcacatccagacttctgctgtcatcaatttcaaactgttcatcgcctttttcttcctctgattccctgccgttgtatttgctttcgtgatcgccgatccctgtggacacccctgctgagatctttgttgcggcaatcttcacaatgccgttccgaaactctgcgctttccctggatgatacggtaattccggcaaacggaagaaaaatacgatatgcacagataatctgacagagctgcttttcatgaacatccagaggattgatcttatcattgttaataataggacgaagtctcggacaggacagagacatctctgcatgaggatattttcgctgaagataatacacatgaagcccggttgcaagagcatccttacggaaatcggaaagcccaagaagagctgagaaagccactcctctcatgccgccccgcagagcccgctcctgagcgtcaaaacggtagggccatacccttttgtgccccatcagatgaagctgttcatacttatccgtatcataggtttcctgaaatacggtcacatagtctgcgccgcactggtgaagataagcatattcgtctgtatttaccggatagatttccagtcctaccatacgaaaatatttccgcgcaagcttacacgcctctccaatatacgttacgtcactctgactgcggctttctcctgtaaggatcaaaatctcctccataccgctgtctgcaatgatcttcatttctttttcaatctgctccatggaaagcttcatgcggctgatatggttatagcagttaaatccacagtacacacagtaattttcgcagtaatttgcaatatacagaggcgtaaagagatacacggtgtttccgaaatgccgtcctgtctccatgcgggcccgctgggccatttcctcaagaaacggctctgccgccggagaaagcagagctttaaaatcctccacggagcaggtttcatgattcagcgcagcccttacatcagaagctgtgtaagccgaatagtcatagcttttcatctgatccataacgtgaccgcacacctgggattcaatctgttccatcccgggcagatattccatatgatttttccgaaaggaaggatctgtctccagacggtgctttttttccagagctttttcagaaagatactcagaatctacaaaaaactgattttccactttactcacctctaatcccttaaaaatcctgtcagcggatcagaagcagctgctcctcttgtaagcactcttccaatccctgcaagatatgcctttcgtccggcttcaatggcctgtttaaaagcagcagccatcagaggcaggtttcccgctgtggcaagagctgtgtttgccataattgccgccgcgcccatttccattgcctcacaggcctgggaaggctttccgatccctgcatcaacaataatgggaaggtcgatctcatcaataagaatctggataaaatcctttgttgccagacctttatttgagccaataggagaggcaagaggcatcactgccgctgctcctgcatttgccagatcacgggcagtattcagatccgggtacatatacggcatgaccacaaatcctttatccgccaggatctctgttgcttttacggtttcctggttgtccggaagcagatatttggaatcacgcatgatctctatttttacaaaattaccacagcccagttctctggcaagacaggcaatcctcactgcctcctcagcatttctcgccccgctggtattgggaagaagggtcactccttctggaataaaatccaggatattttcctggtcctttgtgtttgcccggcgtactgccagtgtaataatttctgctccggcgtcctttactgccgcctggatcagcttcagggaatactttcctgagccgagaataaaacgggagttaaattcatgtccccctatgatcagcttatcattcattgtccgtttcctctctttgtgcattgttcttccactgttatttgcgcagttaaatatctcacgatttacagtgcgctttcccattgactgctgctgtctggaataagctttgatttattactgttgctgtaaaattgtggcagtagcattattttccggcaagtatgcgcaggactgcatgagcctggtgggctgcgcataccatcactctggaagccacaaggctgtgctgctcttttacctcgctggtttcatctccacagagataaaaacgttctgtgatctttctggtacggatatcattggcacttcccattcctgccattcccgatgcggctaccagatatttttcccgcatgctgcacagtaccacatcggtaagcatggctttgctttctgcatcatcaaaggcctcacagataatatctgcctcctctaaaagctcttttgcattgtcccgggttatttttacattatgtacttccgtgttcagatacggcgcgatctctttgagattctcctccattgcttctgttttgctctttcctacctgtgtagccttatactgctgccggtgaagattactgacatctacatagtcgaaatcaatcaggatcagcttaccaatcccggctctggcaagggcttcggcaatgtgagagccaagccctcccagaccacagactgccaccactgctgaagaaaatttctcctgcagttcttttccgtgacgcatcttaaatgcctgttccatttcttctctggttggaatcattcagcctcctcctacaaagctcactacttcaacgctgtctccatttttaagaaccgtgtgggaatactctgcctttggcacaatttctccatttttttctactgccacacgcggtatctgatagcctgcgccttccagatattctgtcagagtttttccctctgcctccagaagcttgccgttgatctttaccatattttcacctcttttcaagcagaaaccagactgttccgccccgcatttcaaaatcccatggaaaaggaactgctttcccggtaaataaaaaacgagaaactaccagcttcggtaatttcccgttatacatacacttatgctcaggcatccctacgttggcattatccaaatcaggttatcggtcgaaggtcataccttcctctcagcctgtcatacaagctcccgtctgctttattttgttttattgtttatcataggttactgttcccggcaacctgtgaacagtaattattatatacttctgtactgtaaattacaaggattttatttttaccctgtatgtcagtcaacaatggtgatgctttcgatcaccggctgttcttctggtttgatggttccgttgtcatctgtgggtttcgcatccttacagattgcatccacaacgtccattccctctgttacatggccaaagcctgcataatctccgtccaggaaggtgctgtcctcatgcacgataaagaactgagagcttgcactgtccggatccatagctcttgccatggaaattacgcctcttgtatgagaaatattattttccacaccattattggaaaattcgcctttgatattttcatcagagccgccggttccatttcccagaggatccccgccctgaaccataaagccgtccataatacggtggaaggtcagtccgtcataaaagccctcctgagccagttttacaaaattggtcactgtgacaggagcggtatctgcatccagctctacctggatctcgccgtaatccttcacattgatctgcgcatgatggattcctgtcagctctttactggtatcaagaactgcctcttttgtatcctttgcatcggaagcttcctctttatcagaaacttcctcaccggtaccgtcgctgaatcccgctttttctgccatctcgtcactgactgtcttctcgctgccgctctctgtctttgtatcttctgttttctgtccgcatcctgtcatcatacctgctgtaaggactactgcacaaagtactgccagagttttatgtttcatttttattttcctcctgattctgctgtttgctgacagaaaaccttcctgtgactttctgtcagattatgttcatatgccggagtttctctttccctttttcttaccggatcctgtccggaaaaccaactttcctctgaaccttgcgcagagttttggtagcaaaataattagccttttctgcattttctttgataatggaatcaatatatgccttatccctggaaagacgggcaaattcatcctgaagaggtttgagaacagaaataacagactctgcaaccgccggtttcagctcaccatagccttttccctcaaattctttcactgcctcatccggagtttttcctgtgcaggcacagtaaatctcaatgaggttctttacgcccggctgctcgtctctgtagcttacgtagccctcggaatctgttaccgcgcgcttaaatttacgcataatggtatccgggtcatccataagataaatgctggcattgggattttcgtcagatttggacatttttctggtgggatcctgaaggctcatgatctttgctcccaccttgccaacatatgcttccggaacagtaaacacatctccgtaaatgttattgaaacgctctgcaatatttctggtaagctccaaatgctgcatctggtcaattccaaccggaaccacgtctgtctgatacagaagtatatctgctgccatcagaaccggataagtaaacagacctgcattgatattatccgcatgctttgcagatttatccttaaactgagtcatacggttcagctcgcccatgtaagtaaagcaatttaagatccaggccagttcagcatgaccggaaacatgggactgataataaatgcagttctttttcgggtcaaggcctgctgcaatataaagagtcagaagattgcgggcgcttttgcgaagctctgccgggttctgacgaacagtgatcgaatgaagatctaccacactgtaaaagcactcatattcatcacttaaagtcagccagtttttcagagcgccaagataatttcccagtgtgagatttcctgttgcctgcattccgctgaataaaacttttttatcatttatcatagtctatacctctcttactgacgcattttggaaagattctgcacattctgaatgtcttccttattaccggaatcatgatttcctgaaacaaaggctgtccacgttctgcagtttccggctccggaagctctgtgaatgccttctgagcctttcctttatgcacatctgaattgtatattagtttatcattctgtagaaataaagtcaattacttgtcacctggaacctaatctgttaaaatagtcacaggtcactatcccgcagggtgttttggcgtatatatgccaaaatcccgagacatacagggcaaaatgccatcactaaagacaatttaaaatgcattttgaccaggttactgcaaaggtcgtgagcagtaacttaaaatataggaagtataaaaatccaggaggaaaaaacatgaaaaaaattgcgagctttaccatagaccatattaagcttcagccgggaatctatgtttccagaaaagactatctgggcgatcaggtgatcaccacttttgacattcgtatgacttcccccaatgaagagcctgttatgaatactgcagagcttcatgccatggaacatctggcagctacttttctccgaaatcatacagaatttggaccaaaagtcatttactggggtccaatgggctgccgcaccggaaattatcttctgttggcaggagattacgaatcaaaggatattgtgggactgataacagaaatgtttgaattcatccgggactttgaaggagaaatcccaggcgcttctgcaaaggactgcggcaactatctggatatgaacctgaacatggcaaaatatctggcagataaatatttaaaagaggttctttacgatatcaaagaggaacggctggtttatccggagtaaattagaataaagaaattttcgaggccagttttgtacaataaactggtcttttgttatataagtgcaaaatagatttactttgttattataagacagaaccgaatttatcctttaagtagttattgatcttatttacaatatactcggcattctctacctgctgtttcgattccgctttacttgctatataaaaatcatcataatctgatgcattacgaatttggtctgcattgacaattttctggtaatcctgagaagtaaatattccatctcctttaaaaataaagagataattgaactgtttaatcctccgttatgagtggcaacctctactttttcagttgccaaaagagcctttacacttttttcaattgcataaaaagctctgttatttgcagatttatatgatgatttttctaataaatcttttgcttctattaaaagctcttcagcccgatccattctcacctttgcaagagccatataatatccttcatccatataacactctcccttcctgttttatattacgaaaataatcataccaatcgtttttgtctatatattcctcatatggaaggcatacaaaatttacaaccgcaaagtatttcattgccagctccgttgcaatattggctaaaacactgccgtatttttttgccttcaaccgatcacttttcagcagcagagcaatatcaatatctgaatcctccgtataatcccctctggcgcaagagccataaagtataatttttaccacatcagatcccatagcctctgttattaagtgaactgtttctttttctactgcctgtatcacttgctcattcaaactgatattatacattctttaccacctcccggaactttcttaatttaattataggacaaatatccaggaataacaatatttaaaaaccagagcttttctctattccaaatagaaaatatgctctggtttttcttcgcttttttttactgaaccggcgcggcagttccttctgccgcaggggttactgccggagcctcagtggtcacatactgggcgctgacataccctttctgtccatcaaggtctacctcgatccactggccgtcttcactgacgcctgtgccggtaagctgatcgcctaccttggtgctcttgatgatatttgtctgatctgttgttacacagtctgtacggatattcgcctcattgtttgcataatatgtaacatttttctgtatgatcttgacgccgcttgctgtctgagaggtctgcggcaccggtgttgctgtcacagccggtgtaggtgttgctgccggtgtgggcgttgcagtaggggttggggttgcttttatcacagtcacggtagaatcctctcctccagtgctgtatccgcagccggatgcaacaagagtaagacctgccagtgcaatcagtaatctggatttcttcataagaattttcctcctttatagcataccaccatgataccccattccgggtggattatgcaagccttttttgcttttgacctcagaaacggaaatctctttttccctgttcaatctctttgagattccttgcgcagatctctcttgttttttctctttccaccttctgaagctctttctcgatcaccttcaggcctttctctcttgtatccggggaagcataatcctccagatattctttcagcgtcatcagggcattgggatgacagcagttggcgatctgcccgctctttacaagagacatgaaacggtctcctgtgcgtccttcccggtaacaggctgtacagaagcttggaatataacccagctccagaagccagtttacgacctcatccagagtacgtctgtcgctgacatcaaactgtgatgagttgtcttcctctgcctcttcctctgcatagcctcccacagaggttctggagcctccgctgatctgggaaataccaagatccaataccttttctctgcatttctgagactctctggtggaaatgatcattcctgtataaggaactgcaatgcggatcacggctacgatcttctggaaaatctcatccggaactgcattggtaaagtcctttgtgtcaatatcgtcagccggacagattcttggaacactgatggtgtgagggcctactccaaaccgggcttccagatgctctgcgtgcatcaggattcccacaaagtcataacggtaggtttccagtccaaaaagcactccgcagccaacatcgtctattccggcttccatagcccgatccatggcctctgtgtgatatgcataatcacttttcggtcctgtggggtgaagagcctcatagctttctttattataagtttcctggaaaagaatataggttccgattcccgcttctttcagcttcctgtaattttctactgtcgttgctgcaatgtttacattcacacggcggatggctccgtttttgtgtttgatgctgtaaatggttttgatactttccagaacgtattcaatgggattgtttttgggatcctctcctgtctccagagcaagacgcttatgtcccatgtcctgaagggcgattacctcctggcggatctcctcctgagtcagttttttacggcggatgtgtttgttctttgcatgataaggacagtaaacacagccgttgatacaataattagaaaggtaaagaggcgcaaacataacaattctgtttccataaaatttctgtttgatctcttttgccacatgatacattttatccaccagcaccggatcatcacattccagaagaagcgctgcttctctgtgacttaatcccttacagtctcttgctctctcgatcagcccttcgatcagctccgtattatttttatttgctctggcatattccagagaatccagaatttcctgatgatcaataaattctgttgcctttgttgatttcggattatacataagtcctccttctgctgccctgaagcagcctgtccttttattttttataatctccccggtctgttacaatacaacagccgattgtctccattctctttcttaactgttccacacactctgcggcctcgtcacctgtggaaatttttccgtcataaagcatatatttttttctcacagaaagaggtgacagattgggcatgactacgttggctccggaaagtatcccaagctctcttccgtcaggggcaatggtgccaagagcagtggttgccggaagaagcgcctggggcagcatcagccgcacaagagccaggtaaaacagcgtatcctcaagggttccgtcctctctgctccgaaaaggagtatccttatgagaaataaaaggcccgatgcccaccatttccggatccagttcttttagaaacagaaaatcctctgccagtgtctctgccgtctgtcccggagaccccaccataaatcctgctcctgtctgaaatcccagctttttaagcgttctgagacagtccttcctgtgctgaagagataagggttccggatgcagaatccggtaatgcgtctcgtctgcagtctcatggcgaagaagataacggtctgctccggccttccagaatgctctgtactcttcctccgttcgttcccccacggaaagtgtcagggcacagtccggatattgttttttgatatgacgtaccagcccggccagcctttcccctgtaaaatatccgtcctcgcctccctgaagtacaaaggtacgaaatcccagctcataaccctgttgacaacaggaaaggatatcctcttctgtcagacggcagcgctgggcggcatgattgctccttcttaaaccgcagtagtaacagtcgtttctgcagtagcttgtaaattcgatcagacctcttatataaacctgatctccatatattttctgccgcaccccccttgccagcctccgggcataaagatctgtctctgtatttctgttggatagcagtgtcaaaaattcttccctggtcagttcctgtgtatggtgcagcttgtcgatcagttctttcatagctctttctccggcatttttgagtatacggttttgctggtaatgccttccagcattccaagctttccggacagcgcgctgatcttttcctggggagcatccagtatcacactgatcacagacactcccttcggacgataaggcactcccattcttcctactatatattctccatattcatggagcagccgattcagttccccgcttttggaacggtcttccacaataatggcgatcactgcaattcttgtatccataaaacatctcccttcctgtctgtttccgccagatacaggctgtcatatttcccatgcatccgctcccagcctgataaaaaataaaacggtgtccttctggacaccggaacatatacagaaagaccgcagtttctgactgcagccgtatctcactgttttttacattctctgacgcccattcttctcaggctttccttaaaagtccggtactgtttcagcataccatatcttttcgtcaaaaacaactaatttttctgtaaattctcgtttttatcgtcattatgtataagttctgtcacaattctcccacgattattctgtggagcacctgatggatcggactccgtaaaatactgtttttatatagtgtcagccaccttctgcgctgcatgtgccggtatttcagatctatatgccggcacgccttgcagggtcttatctgtgaaacgtttccggcattctgtgtttctttacaaaattcccggattttatactatactcggcacacaatttctattataatgaaaaaaacgttacttcatacagtaacaggaacaacacctgaagtttcagcgccgttctgaaatgatcaggaatctatctacaacatcggaggaaaaatatggattctgcattatatgccaattatctggctatcctgcatcatgaactggttcctgctctgggctgtacggaacccattgccattgcctatgctgcagccaaggcgcggcagattctgggtgaattcccggattccgttgaaatgcatttaagcggaaacattataaaaaacgtaaaaggcgtcacggttcccaattccggaggactgaaaggaattgatattgcagtgcttcttggaattacaggaggcaatgcggataaagctcttgaagttcttgagggcatccgtccggaacacatcagacaggctcaggagctggctgaaaaacacatctgttcctgcacccttgcagaaggtgtttccaatctttatatctgtgcaaatgtaagaaaagacagccactatgcggaagtgaccattgttgaccagcacaccaacatcaccaggatcgtcaaagacggccaggttcttttttccggagaaaccacagagaaaaagcaggaggaacctcctgttgacaaatcaaagcttacggtaaaagacattctggattttgccgatcaggtaaagatcgaggacgtccgggagcttctggaacgtcagatccgtttaaatacagcaatttcccaggaaggcctggacaataattacggggcgcagatcggcaaaacactgatgcatgtatggggaaaaggaattactaccagagcctgcgcaagagctgccgccggaagcgatgcccgcatgggcggctgttccatgccggttgtgatcaattccggaagcggcaatcagggcatgacagtttctcttcctgttatcacctacgcggaggaatgggaagtttccagagcaaagctttatcgttcccttgttgtcagtaacctggttgccattcatcagaaatattatattggaagtctttccgcatactgcggagctgtcagcgctgcctgcggagccggagctggaatcacttacatgtacggcggaacctatcagcaggtttccctgactattatcaacacgctgggaaatgtaggcggaattgtatgcgacggcgcaaaaccatcctgcgctgcaaaaatcgcctcttctgttgacgctgccttaatggcttttcacatgagtatccagaataaaagcttccttccgggggaggggatcatccggggcgatgtggaagaaaccataaaaagcatgggatatatcggccgtgtgggaatgaaggccactgatacggaaatactgaatattatgatcgaccgcgtaaatgtagatcaggactgctgattcttaccttaaaggaggatatttttacttatgaaagaaaaaaacagtttttttaccagtttaccatttaagcttcttgtaggagttattcttggtattgtatccggaattatcctgaatacaacagacggctccggcatcacttccggtatcctgaatgtggtggtcactctgaaatacgtgcttggacaactgatcaatttctgtgtgcctctgatcattattggttttattgcaccgtctattaccaagctgggcaacagcgcttcccggatgcttggcgttgccattgtgatcgcctacgtctcttccattggcgcggcctttatgtctacagcagccggatatgcaatgattcctcatttatccattgccactgacgtagaagggctgaaacagcttccggaagtaatttttgaactggagatcccgcagatcatgtctgttatgagcgcgctggtcttttccattatgatcggacttgccgcagcctggaacaaatcaaaaatgatcacaggggttcttgaagaatttcaggcaattgttctctctattgtttccaaagtgatcattccggttcttcccttctttattgccctgaccttctgcagtctggcatatgagggctctatcacaaaacagcttcctgtattccttcaggtaattgtgatcgtgctgatcggacattttatctggatggctctgctttatgttcttgcggggatctattcacatgaaaatcccatggatgtggtacgttactacggtcctgcttatctgaccgcagttggaaccatgtcctcagcagccacccttgccgttgctcttcaatgcgcagggaaggcaaagccgcttcggaaggatatggtacagtttggtattccgctttttgcaaatatccatctttgcggttctgttctcacagaggtatttttctgtatgacgatttccagaatcctgtacggctctcttccctctgttggcaccatgatccttttctgtcttcttctgggcgtatttgccatcggtgctcccggtgtccccggaggaacggttatggcatcccttggtatcatcaccggcgtgcttggatttaatgaaaccggcactgccctgatgcttactatttttgctcttcaggacagctttggcactgcctgcaacgtaacaggggacggcgctctgacccttttccttacgggctatgccaaacgccatcacatccaggaacagaatatccacgttgatctctgatccgtattcataaataaaaactgcagaagtccgtttcttttctgagacgggactctctgcagtttttatgattctcactgtattctcctgtaaaacctttcttttttataaaatgtatttcctaatttatgatttcagagcattctttttcccctggtctgcatttttataacggcttctgactttttattttgatgattccaaagtattctttcctcttgggataaaggttcccagtttttcttctttcagttttccattctgtactgcatgatgacctctcaggaatacgtcgtcaatggcacagtgaagagcaaatccttcaaagggattattatccgtattgtatgcatgagttttagctgagatcacactttccttttccggatccagaacaacaatatccgcatcactgccctcccggatcacgccttttttcggatataccccatagagctttgcgggattttcgcataaaaatctgcacatctgggcttccgtgatctttccggtacggacaccgtaggtatacagaagcgttcctcttgtctgtactcccggaagtccgccggggatctttgtaaagtcatcctttcccatagccttctgttccaaagtaaaactgcactgatctgtggcaacggtctgaatgtcctcttttttcaatgcatcccagagacaatcctgatcctcctttttgcggatagggggcgcgcacacataaacggctccgccaaaatccggtctggaataggcactgtcgtccagaagaaggtactgaggacaggtttccgcatacaccgtctgtccttcctttctggctttcataatctcttcataggctttgcggttagtaagatgaaccaccataacaggagcatccgcctcttttgcgatcacgagaagtctgtggacagcctcagcctccatggtatccggacgtaccagaggatgattttccgggcctgttcttccctgttttttggcttcatcgatcagagcgtcgatcactccggcattttcacagtgaactccggcaaagcagccgcactctcccagttttttcagaatcttataaagatcacagtcatttacgatcatggcaggataagtcatgtaaagcttaaagcttgtaatcccctcatcgatcatatcctggacttctttttccgtctgctcattccattctacaatggacatatggaaggaatagtcgcaggaacattttccgtctgcctttccatgccatttttccaggccttccttcagcgtatggccgcccttgtcctgagaggcataatcaatgaccagagttgttccacccagaatggctgcccttgtccctgtctcaaaatcatctgcagttactgttccggcaacctcaagatcaaaatgcgtatgcccgtcaataaagcccgggaaaagcagttttccggttacgtcaataacctctgcatcctctgcaggcagattttctcctaccctgacaatcttttcaccgtctataagaacatcctgatcgagtataccggaacctgatactatcgtaccattttttagtaaatatttcataatcaaacacccccgatttccctttcttttattcaatataccattatttttcccctgcttcaactgtttctgcgcaggttactcaaaactttttcatgcttacacgggagtttgcctgcttcataatcctccaaaatatttactatttactttctcctgcagataaatatcccagcatggctgcctgaagctgagagttgcttccatcaaaaacccattcaccatcttctttgcgataattcaccagaacctcagcatcctctgtctctgtttttttcagcttttccttaaaaactttttcagtatattcatcatcttcctgttttttcatcgtttcaaagattgcctcatccatcacagaaagatagtctgcatttgttatctgtaccaaaactgtagctttatcatcctccaccgtctcttcctgaatcttatacttcatgttggcataagctgctttcatggcgtttttctgaaggactgcactattctcatagctgtccccgtcaaagtccgccccaaccaagtctgatgccttttcatacttcccatctttcatataagcaaggtaactctctgttatcgtttttggagtatcctttcccccgcatcctgcaagcgcaataattaccagaaatcctaggaatactgtcaatttttctttcattctgctttcctcctcttttttcttctgtatacccggatcaccagtatcagaagcagtatcccggctaccacagccagataattttcccactttataactttaactggcgtattctcaacagcttcttccacatattctgtccgcacgccgcgtaccagcagacgatggctgttgattccataaggggtacatgtaagaagcgtaacgtaatctttccccttttccggctttaagtacttggtattatcaggctctaccactttgatctgatctactttatatgccaagatcctgtcaaaaatatggatataaaactcatctcctatttccattttatcgagatttgtaaatagctttgcttccggaagtcctctgtgtgtgctgaggactgtgtgattattttttcctccgatcggaaaagcagtttcctgtaggtgtcccactcccttttccagtacctctgtgtccactgtgtgataaataggcagattaatatccacacagggaatatccagtgttcccataatccctctgtcaatgttcaacacttccatataattatccggaatcaccacgccgcttccggggacaaacggatctcttacctctgtaccactgagacttttattatattcttctgccttagcccattcttctgcaaccatatcctgattataataggctgcgctgtcctcgtatcttgcaaccgcctccgactgatttaatccagaaaatatgcgaagtgccagaggataaaggattatggcaactcctgcaatgcggagaagaagcgtcaaaatttttctaatgttcattatatcctcgcgtttcttatatctgtcccggtaaactgaatgatatccagctaagctaaagggagggggaactttccccctcccttggttctgccggatttttattactgacagactaaaattttattcatgattttttactttgcagctttattttttccacctttggagattacgtaagatgcgatcagaagaactgcacctgctcccaggaataccagaagacctgtaccaccggtaaacggaagctcatagttgtccttagcattataaaccacatacatatcctcaggattcatattatggcttgtagcagatactgttactttaaatggatcaagaagtcgattgtacttaacaccatctactgttggagcttttgtctccacaatccagtaatcagtacttccatcagttggcttcatacctgtcaggtcaccatagcttaatccttcaaagaatgcaataccatcttcaccagaggtaaccacatatggcttgccatccctctgtactgctctggaagtatctccagcttttgcctcttcttcgctgcggtaaatcataaattcagcgccttccagtttcttgttatgatctgctttgtctactttttcaatctttacaccgccggtatgaacttccggaatatcagactgtggtaaatactgatgtccattccagttaatgtaatcaagagatgcctggttaggaattgcagtgccaagttcagcatccttattcagctttgtagcaaatgttgttacaaccttaccgcctgcgtagtcttttaatttattaagtccatctttggtcagagtccaggtaaggtctctattatttcctggtttatgaggttcttctgtcagatccttggcttcaaatgtataatccacatccttttccaaagttgttgttgtctgtttatcagcagttctcagagctactgatatgtcctctacaaaatcaagacggggatccagtttatccataattacatattttttcggagtctgattctctcccgcaacgtcttccggtatatctgaaagaatgatccagttaaatggagcataacgatctacagttgcgtcattgttttcttctttaacaacatccttttcaatctgtggaccatcctgataaatcagattctttggatatacatggatatcatacagagattctggttttgacgtatcattcttatactcctgattataggtaggtacagagatcaaaaccggagccatctttttgtccacacgaggatcctcctgctcggacagccggtaagtacctaacgaaagattaccaaaagtaatctctccgttttcacctgttgtcagagtctgtacctcaaaactgtcgtcacgttctgctgtagcaggatcaagctgtgttgttccgtcatcttttaccttttccaggtcaaacttaatacctgccataggcttcagatctttcagatcctcatgatccgaaaaatcaatgacattgccgtgggaacgatcccctttttcttttaaagcattgtactgatctgttgtttccaccacatacttatgtacggtaatacttcctgtttgtggagcagctgccacaggcgccgctgtcatcagggatacagccatccccagactaagtaaccacgcgcttacttttttgaatactttcatactctttctcctttcattcttcctgcatttctgcacgttttcctttgtttttctttttacgacgcctgtttacaagctctgccaacgccagaagtacacctcctcccgcggcataatcaagcatacctgttcctcctgtaaacggcatctgccttgctttgcggttcattacctgatactggtatacagcgtcctcttccgctttctggaaagccggaggctgtgcaccgcctgtaggcgtaaatattatatgttctcccggttcagcctcggagttcacagtgaatctccactggcctgccggcaatacatatccttctggtgcttctgtttcttttagctggtacgttccatttggaaggattccgaaatctacaattccatctgccccgcttgtcttcggagaaagtccatgcacttcctcccagcagcttccatctgttccggcttcctggctgtgctcatgctcttccttacatgtatataaccggaaaactgcacctgcaagaggctgaccgtcttctccgattttccggaatgcaaacggaacttctgcgccttctggaaggttaatcagtggatgttctgcgtcaatgccttccacttctactgtaatggtatctgatcctgtatcagaattttctgtatcagaaacatctttcccaaaggagacagagaacggatagtgtgtatcatctacctgatatccatctgctgtttcaagctcttttacatagtaattacctgccggcagaagggtcttctccatactgccacttccatctgcttctatgcggataagctccacaagcgtatcttttttaaggcttacgccatctgcagcacctggaatgtcctccgcggcataaactccaaacagaaccttctggtacaattcttctgcctcttctatttccagtccgaaaaagcttttgtaaagattcagatcaactttcttttttgcattggtaaggctgaccagttctaccgtatgcacatggctgccttcctccggcgctctgattgtcacatcacggggtgtgctgtcaagaacgtatccatcgggtgcttctacttcaactacagtatacgttccaaacggaagtttcctgctctccggcttctcgccactgatcagggtatctattacttctcctggctggtatgtactgtcgcctatagtaacagtctcctttgcacgaatttcaacctttgcaccattcagctcaccctgggtaaataccggacggttcacctgatatttattctcctcgatggaaacctctacctgtgtgaagagctcacccttcttttccagacggatcactccgtataccggctcattgacaatcggattctcttttgaagaaatgataatcttctcatttccattatcgtagactactttaaatggataccgtgtctcatccagaagatatccatcggctgtctccagttctctcacataataggaaccctgaggcagcttcagttcaggattggcaaatccgttttcatccactccaaatacaccgaccaatgtatcgggctcgatctgcaccttaccgcttgttatggttcccaccgtgtatacaccgaattttacctgtttcagcttttctgaagtattctcatcactgaacttcttgtataactgaaggttcacgctggcgtgctgattttccagtgatacaaatgccggctcaatctgagttgttgtttcggtcacttcaactttatgacgctgcgtgtccaggatataggatggcggtgctgacaactcctgatattcatatgtaccaagcggcagtcccggacttgtctcacccgattccagacgcacaatcaagtctcccggctgatacgtttttccatcaagctctatttcttctgttgcataaatacctatctgtgctcctgaaagctgctgctgttcccacaccagctctttaaggtttggataagatagatcatctttgatctcacttaacatctcacctgtcttttcaaatcggatatatcccttttctttttcattggggatatacagtgcaatagtcgttgtctctccccatacaaaactgtgtgcagtttcatcaagctgataaccttccggcgctctcgtttctttgagatagtatgtttcgccctcgatcaaagcacctgtgtccgtgatctttacctgaccattctcttctgtaacgtacggtcctccgatcttctctgtcagtgcagcatccttataaagatcaaactgagcacctgccagatacttattcggattgtctttatcgtacttcacgatatagatacccggctcgttgcctggataattcatgacagtaaactccacaatctgctcgttctcactgatacggcatctgagtctgagattcgtatcaagttcatagccctccggagcttttgtttcacgaatgatataccagccatatggcaacagcttgcttgttgcggtaccatcctctcccgtagtaatagaatctaccggttcgccatctgagccactctctgcataaacagcaaactgcgctccagcaagtactttgcctgccgggtctgcttttttaatcttaatctgtcccatcactatcttatttttgtgcgtataggtgtaaatatcattcacacctgttccgtctataacgactgtaccttcctgtccgttgagctgtgttccatccggtgcctgtatctcccggatggtgtatgtgccaagcggcagctcacggctcttggctctgccaaactggtctgttatgaccgtatctacaaccttgccgctttcttctataatctggaatcttgcattgctcagatctattttttctatttggcttccatcttcggatacagcttccttatggatctcaatccatccggtaagcggttcgttgtaaaggttatgcagataataataatatgttcttccgttcttctcgccttttgtgatatgtacaggagaatcctcttcctgccagtcagtcgatatgccactgccagaatctgtcatcttcacattgtcttctgaaggcttcggaggttttgtctcatcaatatcatcctccacatccaaaagatcaacgagaattggctccatgagacgatagccttgcggtgcttcgatctcccgaatcacatatagatcacagaggagattctcgatttttccgtaaccattttcatccatctcaaattcctggataaggtcctcttcaaaatctgtcttttcctgccagtcaggtgtaaactgatacaggccgaatctggctcctgcaagcggtcttccgaattcatctcttttttgaatggcaatctctgctcttggcttataattaataaagtcaaattcatactcccgcttatcatctgtaatttcaatcggtacaatctctttagacatctcgtaaccggcactgccacagcttaactcttttacatagtaccagccatttggcagatcatctgtttcgtagcgagcaataccacttccatcaatcgccgtagcaaattgagcaatttccttatcgtcatctgtttgtggttttccatctgttccataactgaacagaccaaatacaacaccattgaccggatttccattttcatctgttttatggataattatctctctttgctttgtattctcgatctcatattcaaagatcattttgtcctttgttggtgtaaaccgccataccttctctgaaccatcttcatttaccggagggtcatagcctgccggcggggcatattctaccattacatattcctgcccaagttccagaatatttcctgtagatgcctgtcccgtttcatctgtagtcagatagatcggagaaagctcctcaatatctccactgccttcctcctgatacttctggtatttctcatattcctcggcagtaaaaattgcaaaaatcacgccttccagaggttgatctgttgcgctgtccttctttacaacagaaatgcttcctttatatgcttcatcctcagcctcaatggcaacaagcgggatattctctttaaatgtcaccgtgtacactttgtcatttactttgtatccatccggcggtgtgatttctttcacataataggtaccatacgatagtttctttgatgtgacatgcggagcttttgttaccatatcatatccatccatatgagaagtcggatctatatccccattctccagaagccttgtataaatgccataaacagcaccttccagtatctctcctgtttccgcatccttcttggtaagctgaatttctcccatcagaggtgtatttggtacttccaaagtaatttccgctccaccttcaggactgtctttgcctatttctacatatttctcaaaatcgctgtttaattcatatccctccggtgcctccacctctcgaatacggtaaatgccatacggaagattctcaaaaactgcgtatccgtcatctgcggacgttgcccggtaatatactccaaactccgtactatatgcctcaaacactgcgcccggcaacacctttttagtttctgaatcaaccttacggattttcagtgttccctttaaaatctcattaacaaaggtaaatgtcagggtttcctctgtagaatccttattgatcgtaactttctgtgacggattttctgccagttcataaccttttggcggctgtgtctccactacctcgtaactgcctgccggaagaagcctggagactgcctctccgtgcatatctgtcaccagagtatccacttctgttttgctctgtccatctgttccctccagacggtagaccttaaactctgctccaaccaaaggcttgggatccttcttatctccgtctgtctttttaatacggatcggcatcagaatctgctcattttcgaatactgcttcctgcatttctaccagtgttcctgcaccagcttttacctcaactgtttttgatggctggtcgctgatatagtaaccatccggcgcctttgtttctgttactgtatacattccaggtttcagcgcatctgtctggaaagctccgctcttatctgtcttatagacctttgaataaccatccggacctgtcacagtaaattcggctcctgcaagtgtactgcctgttgccttgtccgtcttcaccacgcggaagtaaccttcctgtggctgcggataatcttccgctacaagcggctctgcttccttccagtccttatcaactgtcactgccataatacgattattgagctgataaccctccggtgcctttgtctcgcgtatataatatgtaccataatcaagctgctcaaatcttgccagaccgtctgctcctgtcgtctgcttctcaatggcattctgctgctcctgtgcatcctcgctggatttaaatatcgtaaactctgctccgggaagaatcgtctccggcttctgggcatcgacttttttaatcacaaatccacccttttttcgtgcattcgttgccgtaaccgtcacaagcggctctgcttcagaaagttccgcctcatatgtctgctcagaaagctcataaccatccggcgcctgagtttctaccagagtgtattttccgtaagtcagctcctttgacatcgcctcgccctgcgaattagtcgtaagctcatcgactctttcaccactctcatttcgcacttcaaatactgctcctgcaagtgggatagttctgtccgtctcgtccactttcacaagcttgatattaccttttatcagcctgttatcaatcacaagcggctctgcttcatatataatattaccatttccatcgtcttctttagtgactgttactttgtgcggcgtactgtccagaacatacccttccggagctttgatctctgttactgtatatgtctgatttcccgcaggcacctcaactgttacctcaccattttcatttgtaggatcagttgtagcaataagggctcctgttttctcattacggatttcaaaaacagctcctgcgagtggtttcttagatccctcctcttgctttttaatctcgattgcaagcttctgtctgctattttctattgtcagctctactgtgggcatcgtatcatctacatggacaggaattttttctgtcaacagctcatatcccggaggaggtgtcagctcataaatatcataatctcccggagtactaagaagtactgtggcgatacccgtggcattggatttgaacgtcacgatcgggtctgagttctgcggagacttgcctttttcaaatactccaaagacagctcctgcaagtaaatctcgtgtttcgctgtcacgtttgtatattcgcagtccatagttcgcctttgtgttttcgattgtttccacatataccggatttatctggttcagctcaaacggatacgtttttcctgttgctgatccataacctgccggaaaacgaacttctttgatatagtatttgccataaggaagagaaatcggaccaatcttaccatccaagtttgtgataagctcgtcgcccacctgctggtctgtgtcttcacgatgaatagtaaagacagctcccgcaagcggtttctggttatcttcactgtcaacttttacaattgtcagctcgccttccagttttcgattcggaatatccagctcaatcatctgctgattcttctcaaccgcaaacggaatcagttctttggaaatctgatagccctcaggtgctttgatctccctcaggaaatatttaccgtaaggtatgttattgtattcgcctgtaccgtccataccaatggtgattattcctactttttcatactggtcagatcctgcatcttcgtagctctgcggaggaacgcccttacgaatctcaaattctgcacctgaaaggagctctccattttcctgatccatctttctgattcgaagattgcccataacagatttattatcacaatttactgacagcctttttgccgtaattgtctttccatccgaaccatattcattctcaaactcttcaagggtataggtataaattgtcggatccagaatatatccctcaggtgcctgaatctcctgcacagagtaagaatctgctctcggaagattttctacccgcacgccatccggcgaatcagtagttgttacccgaatcggatcataaccatccggcgtaatctcaaatacagctcctggcagataagtacctggatgttctgcatcttcctttatcaaattcagagaaatgtctatctttcttaatttgttcggaattttaatagtcgctgcacttggggcttcttctactgtaatagttactccgtcaggatttattccagcctgcggttcttggaatgtcaggattccataatcaatactgtaatccagataaacaggttcctttaaaatttcataatcgggattatccaccgaaatctcttcaattttgaaccgattcttatctaaatacacagtccagaactcattcaatgcagtaatatctacatctgcatatccaccatttttcgcctgtgtttttacagttactgatctctctgttccttcatccgtaatgataaattctgcatccagcggttctccgttttccccgaccttgcgaagtttcatttccggtagtcttgcattgctcacagtatgagttaattcccgcctgataacaataccgttctctgttatttcatcgaatctactaatctcatatgtcgttattcctccagtagtatagtaccctggaggtgcctgaagctcctgtacttgataatatcgagcataaggtaattcaatctctacaccatccggactatcagttgtggtcacttcaatcggatcttctgatggtgtatgtccatcttctaacggtgtaatccgaaagactgctccagccaggtatttgtctgggttatctgtatcatgcttgatcaatgtaagacggatagggatctttttgttgactaccgtgattgtaagagtattttcatcataggtaacctgatccttatttccagtttgaccaatcatcattacatctattgtataattatcagccgaatcttttattaaccataaaaaagcaatccttccttcgaccacctgatactgcggatccgtttctgtttcataaacctgaagtgacatacgagtctgcttcggtgcatctactgcaatctgtgaaatcaaatcctgaaaatcgtacagtcctgtctctttatccgtttttacaaaatatgtcttttcaaatttacctgctactggagaaattccctctaccgctattgaaaactccgcctctaccggttctccgtcatcgccaaccttacgcagcttaaattctgttttttgaggaatattttctacatctatcttcacaatctgaattgcctgtgtagaacctgcttctattttgatcggataatgcgtgttattcggttcatatcccggtatctgagctgcctcaaccacgtaaggattggctcccagacgatccagagggattgcccgactgactgctttaccattggaatccgtcacaatagattcaataagctcatcatctccggacataatattgaatcggacatatggcaacggctttttattttcactattacatttgctgatctctacctgtactttctgtgcaggattggcaatcgtaagcggaatgatctgctcatgtttttcgattgccaccggatagccttttatagatggatcatataagtcattgcctccattttctacatcattcagataaccatctggcacctttgtctcacgaataacgtaattgccataccgcaaatcctcaaaacgggcaattccgtcttttcctgtcacttctgttttaagtactgtattcagatcatctgctctgtaaatggcaaattctgcaccttccaattttttatccggattatccttatctaccttcagaatctctacagaacctttaacaggaggatttttaaacatcacctcgtaattcagctgatctgttgtcaatgaaaaatactttcctgtattctccggcaaaacatgattctcacccggcgttgtctcttccagataatagtgtccctgctgcgcattcacactgggattgacaataggcagattcttaaatacaaccgtacccgtttcatctgtaaccccactggccagcaacgtttttttgtcataacgattatacagctcgaaagtcgctccctgtactgcaagatccggctcatctgcatctacctttttgatggtcacacgtccaagcaactctttattcgttacttcaaaataagccgtaatttcatttcccgcattgttctttgtaacatctaccttccagttttctcctaccacctgtgattcaacattcaggaaatcaaaggtataatcaagcaactctgttttctcaaactgaggtggtgtatatgtctctttgatacgataggcgctgtctgctgtcaaccagtctgaagtggcttctcctttctcatccgttgtcaacttctctactgccagtgcccctttatagattgtaaattcaattccagataatggcagcccatcctgattcactttcttaactttgattctgcctctgtacggttcattcggtacctcgcgtttcagtaaatattctcctgatgactctgccccattctccgtactgatcacaaaaggatgacgaccttctattttctgataaccttttggtgcttcaatttcttctatataataggtaacatctgcaagcaattctgttgtctctgcgattcccttactgtttgtagtcagcgtctgcagtaagtctccatcttcatctgtaatctcaaacacggcacctgccagcggttttttggtatctgttccatatttatatacctgaaatctcgtatctaattttttgttcgtaatctctataacaatctcagaggattctgtctgtatatacttctcatcaatcacaattggtttatccagaagtttatatcccggtatagtttcctcctccacaagacgaagttctcctcgaacaataacttcctttttgtaagtaccaggaatttctactgtaccattacgatctgtcacaagattagactctatggtataccaggtatctcctttacgctgttccagacgaaaacgtactccctgtagcggaagtccatcgctgccttttttcctgatcttcaaatgcagtgtaagctctttgttcggcacacgcactttgttcaatgcagcctctgtaactgttgacttactggcatcaataactattgatcgtacagtatcatccagttcaaaaccctccggtgcagatatttcctgataatatacaagcgtattatgcttataagtatgtgaagacgtcgctgtaccgtcagaaccgatcgtaagagtctcacaatcactcgggtcgctcaggtctgtacccactttaaaggtacagccaactccgtccaggatcggatctccggtacgctcgttatatttctcaatcatcagtcttgcagatttcactgagttttcaaaccgaaaaatattcttggactgatctgtactgatcacaagctcctgtctgttatccggagattccggtacaaggtgtccctccggtgcagatacttcttccatcacaaccgtagtgcccggtgcaaatgtaactgttgaagtaaatctaccctcaccatccgttactgctgtataggttgtctcaggcttttctttatcccagtacttaaactttgcaccggaaagcggctgaccagttccggcctccaccttttccagggtaaccggataccttacacggtcattaacaaaagttacggtaccggtaccgccagttgtgaatgtaacagtttttatctcatcactttttatcagatgcggcggtacttcatgctcctgtacataaattgtattcacacctgaattttccaggcgaatctctgtctctcctttttcatctgtaggctttgtaacctggttcagatttgtcttggatgttccatatttgaatgtaacaccggaaaccggagctccagtgtcatctgtctttttaatctttacacgggataccgtgaccacatttgccgtacacgaaacagaaagtgagggcagtgtaccggatacaatcactgtctgctgtcctgaacccaggtagtacatcatatctgcatacttgctcggtgcttttgcataatcaaatctaacactcctgatatccatagcaggatttaatttaaattgaaaccgacttccaaatcccccatattcaagcacgccgccagaaggtaacgctttgctcaatccccacggactaagtgatcctgatttcagtttaattgtataaatcttattcggatcacttttgtcctgataaagagttgtattttcaaacaccggcttagtattgaattcttttatcagacgtttaatttctgcttttcttgtatctacaactgaattaagactggcacctgcaccgcctccgctggtctgccgatgccatgaaatattggacacacccagttctttccagatcagttcctgagctgccataaaatactctacctgcagctcattcgtactccagtgtcccggatactctgccccaaaataagcatactccaacatgcgctttgcttttgccggatcatttttaaaagttggatgctctgtcaagggtttgttatgcagtgtataccatttcgtgatgtcatctacatccggctcaatacagtaggcaacatgcagctcagaagtactggcatcttttccgtatatccatggataattccgattggaatgattaacccccttatacctataggaaagatatactctgccgccgccataggtcattgtagaccactggacaggatttcccggagcatttgccgctaactcagtatcactttccgttccgtcagaaaagacttcctcctgttccccatcagaaaatggctgttcttcctctgtaatttccgtctgaagctgttcttcaccttcttccgtcacctcattctctgatgacgtatcttccggcggaagcatctcttcttcaaaagatatctgtggatctgtcactgaagaatcctgtgtttgctcttctgacacaaaatcatcattctgctgaatttccgaaccaacatcttcagaatctgaaatatcatcactgaatactaccgaatcctgttcatccgctctaacagcaaaagcgctcatatctacgctggtaaacagaattgccattaccagaacccaggatattatctttttaaaaacgcttcctttttcctctaaaatctttttcattctgacaccttcctttttctccttatcacaatacataccaccactgcagacattccaagcagaactgcaaatcctgtgatctgtgattcatcccctgtttttgccccgtctttcttctctgtacttaagtgacttcccggaacatcatctccggaataccctggaatatctggagttcctgcaggtttaggagttgttgtttccagcggaactgttggctttcccggaagagatgccttgggatttatttttatatgaaaaaaaggtcctttgttaatatcatctataatttcgtaatagggcagatgcaccaatgacgatgtaataaaaccatactgtgaggactcctctgcccgtatcagatacacacctctgtcgattccggaaaaaacgagttttccatctgcatctgtcttcatactcataagaggatctgttgtaagttttttttcaatctgggcaactgctttctgagaagcttctgctgtctgtggatattctgatatcccataaaccggatcaatagttacttctccatattcagtaacatctcccacatcataaagagccagagctacccctttccagtcagaatagggacttcttaaatcctccagctgtacctcaatataacaatcggcagcatatatctctgttgtaaaaaacaagaggcatacgccgccgatcaatccacataacctcctgattctctttttcataccttccataatctctcctttcttaatacagttctttacagtaagctctacacgggatggcatgtccatattattcattttttgtgcaaattgccttgattctctcatattgcattgttgtctgttgttttcagtatattaaaacaaagtttacttaaactattttatttccactattttccaaattcattataccccccccccccgcatttttccgtcaatcattttcttataaaaatacaaatttcttatttttttccatttgtttttaaatttatacatattttttatttttaccagacaccccaaataaatatggaatttctcaaattactcaaaacttcttgaggcttacacaatttttttcgcaaaaaaactttttatttatatcctattatgttaatataaaagaaaaaagcaacaacggaggaggtaaactatgggacggcttactgtactgaaacagattgctcacgatattgcctgtcagttcggccctgactgcgaagtagtcattcatgatctgaaaacaaaggatccggaaaattctatcgtgtatattgaaaacggacatgtgacaaacagagggatcggagacggaccttccaatgcggtttttgatgtgatccggcataataataacaagacacaggatgagccccgggatcacgccggatatctgatgaaaacttctgacggcaaaattctgaagtgcagcacctcttatatacgtgatgatgacggcagtctccattatgtttttgggatcaactatgatatttccagactgaccatgatcgaaagcgcagttcatgatctggtcactcctgtcaacacagaagaaaagccaaaagaaattacccataatgtcaatgatcttctggatcatctgattgaagaatctgttgctctggtaggcaaaccggtggctcttatgaataaggaagacaaggtaactgccattcagttcctgaacgactccggggcatttctgatcactaagtcaggagacaaggtcgcaaattattttggcatttccaaatacaccctgtacagctatattgatgtcaataaataatctcccggccaacgcagcgcttcacctgtctgcattttcaggttattttaagaaaaaaatctcatacatcagccgggctttttctctgccgcaaaacgctgaatgtatgagatttttatgtttttattttccgatcattcttctgatcacatcaatggtttccttgatgccatagtttgcgctgttgatacacagatcataattttccggttttccccatttctcaccggtataaaactgataatattttctgtgctgtctgtccatttttttcaggaacctcactgcctgcttcaggttcatgtttctgacagccataatatgttccacacgaaccgaaaacggagcactgataaacaaactgatatgagggatatgattgtttttcaggatcatatctgcgcagcgtcccataataatacagtcttctgtttttgccagattacagatgagatcgctcatattaaaaaatactgcatcctgttttggaaggccgtgataacggttaaactcccggaatctggttttcaggcttccgccgctttttttcgtatatttgttaaaatcaacaaagttttccgcgtcattgactgcatccttatctgcctccagacgcttcataacctggtcaaagatttccacgtcatagtaattgatcttaagattgtccgccagttcaaaaccgatatcatttccggcacttccctgagtacggctgatgcagatcacaagatggtcattttctgacagcttttctctttttgccgccagattcagacgcactctctcatcatccaggatatccactttgccgaatacgtccggcagcttctcgatctccataaggatctcattatattctgtcatcatcctggatttttcttctttgtttttaatggtgcgggccatgttgctgataagagcaagctcacttctcagaagatgtccgtccggctttgtatacatcagcatgcttaaagtccggaccgttctctctcttcctcctgtaaaggtccggccaagagaagatcctacacattcataaaccgctccgtccagatcgtaaatccggttggcaagctctgtatattttttctgattgtcttccatatctgtccgccctccttacaaaaagaatacaaaagtatctatgataaatacaggtacaaggaacgccagggaccagagcatatatccgaagaaagaaggcatattcacaccgttctcatcagaaatggacttcaccataaagttcggcgcatttccgatgtatgtattggctcccataaatactgctccgcaggaaatcgcagaaagcagctttgccggaactgttcccagagatgtggcgattccgcttgtgattccaagggttcctgctgttgtgagaaataccaggtaggtaggagtattatccagaaaactggaaagcgctcctgttgcccagaaaagctgggacggctgggtaagaccaagctcaggtcctactgatttcagaagcatcagagccggctgcatagtaataaagataccgataaaaagaactgcaacctccttgatcgcaccccaggtaaaatggtttcttcttctgatctcctgttttgttgtgcggaaggacagccatgctgccagaaggatcactgcgatctcgatcagcgccgggaaacttaatgtaacctctccgaaaatatggattccttttacgtttcctgccccatcctgaaaagccggcattcccggaagcactccgcttaaaataaccgcacctacgatcatgagaaggaatacgatattgtgcagaccatcgattctgaactctgtaccgggtttgctgatatccggcttacggccctctgcaatatcccggcgatatgcccatttatccagatgataaaatgcaaacaaaagaatagccatattaaaaagaagcatgggaagaagatgaaggctccagaaaaaaggaacgcctctcataaatcccataagaagcggcggatcaccgatcggtgtcagacagcctcccatgttggataccataaaaataaagaacaccataatatggcttttgcgctttctccatgaattcattttgatcacaggacgcaccataagcatactggctcctgtggtaccgatacagcttgaaagcagtgtcccaagagcaagaagacctacattgattctcggcgaaccggcaaaatccccctccatggtaatatttcctgatacgcagaaaaggccaaacagaaggataataaaggtcagataatcattgaccgtgcattccagcactgtttccactgtttttcctgctccgtatactgcgatgaacggaagcaccatggccgcgatccagaatccgaccaccagcggctgatgggcttcccaccattcgccttttacaagcggcattactgctatgcacagaagaagtccggcaaaaggaatacagagccacaccggaacctgcgctgccgcctcaccgctgcccgctgcccatacgttggccggaagggccagaactgcagccaggacaacactcataaaagtaagaatttttttcaattacgtcacccccggataagttttttaacaaaaaaattataacatatgaaagtcaaaaatcaattgtgcatgtatgcaatttatatgatatatcaccctgttttttgtgcatttttcatgggattttgacaatttttttgcggatttgctcattcttttctgtctaatatacaaagaagaagtccacctgactccttctttgtataaattcctgttaataatttctgccggatccggaaaagctttctcctccgcttgtaaacgagtcggaagaaccgttatttccgcctttattttccggttttctccttctggtcacagctctgcgtatatacatgtctctcatctgactgaactgtgtttcctctgcctctgcatacagatctgcatttgtctggatcacatttgtcttcatccgattcttctgataccaggatgctgcaaaagccggcactgcgcctgcagctatggaaatcagaagccacttcagaagcgaaagggtcagaggcgtatcagagatatccatggggcggatctttttgccctgactgacacgggaaagtccctgctccagatcctttacaatactttgatacgcgcccagagtatcgtcctttttcagcttctctgtgcagtgatccagcatcctgtcctggattttttctgtaaactgatcctgggcctttccccggaatacaatggtgatattccgggcatccggctgatgaaacacacataatccctcattgctttctccgtatcccacctggttcatctgcataaaacgggcagcatactgacgataatccatctcctctcccacattgtctgtaataagaaatgcggtctcaaactgataggcttcttcaatctctgcaagctctttttccagtgctgttgtttcttcctcatttaaaatcccataattgtcatatacctttgcctgtacagataccggcagccacatgattcctgccagacataaaagtacaggcagaaaacccggaagcttatgtaattttttcatccgatcacccccgccagcataagtatcacaaacagaacaaaaatgacagcagcagaaaatatatgatatttcatccagtaccggatcagcagatcttttcctaccggaagatcgccgatgatttttcctgtctgtccgttcatggcaaaggaataagtttttccattccattttgtattcagaaaccacaccggaagaagcgcatattttacctgaccttttcctgtgatcctgatatcctcctgcacaggaatcaccgtatcatatccgatcaccgtatttcgcactgcccggcgcatactttcttccattcttgcatgtacgcggtctgtcagctcatccggttctctgtcatacctgtctgccatataaccggacagataagaaagctgaaaaggttccagttcctggtaatcgtagggttctatcgcttccatcatcgtatcgtcaatcttttccgaaccatccaccggaatccggcagaatttcatgctcccttttctgacaatatggtaaaagcttgtttccgtacattcatatttttctgtttcccagaatctgactctggttccctgatactggaaacggccggaggattccagatcgtacatccagaaaggcacatacactgcctttatttcttccagatgattttcgtctttaaaaacagaaggaagaagcggttttttcagatagtgttttttcagggcatccagagcgtccttttttgactttttaaatggtatcacataatccggccggtaaatatcctgaaactgctccggcatgatcatcgaattcatgcaataggggcacacaagcgctcctgctgttttttctgccacaagctctgctccgcaggaaggacagctccatacagaaatttctcctccgtccggattccaggattccgggtcaaatccctcccagtgccccctggaatcctcttcctttaaaggctcttccttttgttcttccagctcctccagctcttccactgtatatgaatttccacagtactcacaggccattttctgtgttttactgttaaattcaagaccggcagagcagttgggacatttgtagttcaggatctccatcctttatcccccttctcttatggtcttggccttccgcattcagagcagaatttccctttgtttacagtgccgcaggaacatacccagggtccggacggtctcgggtttccacattcggaacagaattttcctctattgacatttccgcaggagcacacccagctttcctgctgtaccggagactgtgcctcctgctgtgcgcttctctgagacggatcgttccgggccatggcaaaaagctctgacggattcactccgccggcatttgacgccatattcataccggcaaaggccatggccgggcctgcattctgattggacgctgcggcctgcatggctgaggcctgggctcccaccatatgggcagccgccatagccggatttctgaacactgcatttttctgcagttccttcagcattgcctcatcctcttccgatgcctttatgctggaaacgcccagagatacaatacggattcctcttagcttttcccacttttcagacagaatctgattcagagcatcagaaagctccatggtatgtccgggaagctcactgtagcggatccccattgcggagattctggcaaacgccggctgaagagcagtcataagctcgcttctcagctgtccgtccagctcctctcttgtaaattcactttccacattgccgcagacatttgtgtaaaacagaatcggatttgcaatacggtagctgtattctccaaagcatctgacggaaatatcaatatccagtcccaggtttgcatcgatcactcggaacggcacaggccccggtgttccgtatttgtttcctgtcagctcttttgtatttataaaatataccctctgatcttccggagtttctccgccgaacccgaagcgttttccgatctggtcaaacacctgaacgatcccgtcctccaggtcactgcagaacagggacggttctgtaaagctgtcataaacatattctcccggttctgcacatacgtccactacctttccctgttctacaatgatcatacactgtccgtcatttactgcaatcacggaaccgttgctgatgatattttcagacccgtgtctgtttgaggaacgccgtgaagtttttttgcgggattttgatacaagtgtatccgaagacatggatccacagtaaaaatactctttccactggtccccgaagactcctcccgctgctccttttgctgctctgatcagtcccataatgttctcccttctgtcaatccattttctgctgtgatcttctcctttttcaggaaagcttatgaataaaaaatccgcttctcagcttcggctcaaaccatgtggattttggcggcatcagcctgccttcatctgcaatctgcatcagttcctccatagaggtgggatacagggcaaacgccactcctcctgtctcgtcagccatttcctgaagctcccgaagcttatgatttccccctacaaaacggatcctctgatctgttcttggatccttgattcccaggacaggagcaagtaccttatcctgcaaaagagagacatccagctgtgctacaacatccttgtcctgccagatatcctcccaggccttcaggtgataccattcgcctcccacgtacatgcccatgcagtgcttttccaccggcttacagggaaatcccggcatgaccatcagttcaaaattaaatttcaggcttcctacaaacgctttttccgccacgccgttcagatccttcaccacccggttataggcaaggatcgtaagctgatcttccgggaataccacagaaagaaaataattaaactcttcctctcctgtataatccggatgttcctctcttcttttcagtcctacctttacggctgaagcggcccggtgatgaccgtctgcaatataaaaagaaggaatctctccaaattcttttttgataaactcagtttccccatccccgtcgatcacccacactctgtggccgatctcatcttctgtgacaaaatcataaacaggcgcgtgctcttttttccactgttccatcagggacagaagcggctctgtatatctgcatgccataaaaataggtcctgtattggcgttgcagacatccacatgacaaatacggtcccgctccttatcttctctggtaagctcatgtttttttaccactccgttcagataatcgtccacagagcagcagcctgcaataccggtctgagtttttccccttcttgtgagctcataaatataatagcaggacttctcatcctgaataaagatcccttctgcctccattgcagaaagattttcttttgctttttcgtatacgatgctgtcatatggatcggttccttccggaaggtcgatctccgcccggtccacatggagaaaagaaaacggatttttatctcctgtctcacgggcctcctcctctgttaccacatcatatggaagcgctgccacgcgctctgctttttccggtgtggggcgcagcgcccggaatgcctgaaaaactgccataataactgtcctcctccttcttttttactgtaaaaatatacgttaattttaacacaggaaccctgtcttttcaatgtcgctaaatattttttgaaaaacctaaaaatttttgtattttctattgcaaaattcattatttatgatatgatagacttaacaggagcaaaaacaataagtgtaaaacaaattttttaaggagggatttttacatgactgaaggattaaaatggacgcttaatgaagttccgaaatccgacgatactttcctggaattaatgtctgaggaaaatgtaaaaaaagcaaatgaatttcacaaaagcttcccccagtatacagtgacgcctcttcagaagctttcttctctggcatcctatctgggtgtaaaaaatattttctgcaaggatgaatcctatcgttttggtctgaatgcattcaaggtgctgggcggctcctacgccatgggatgctacatagcaaaagagcttggacgggatatcagcgatctgccctacaacgtactctcttctgataggctgagagaagaattcgggcaggcaaccttcttcactgccacagacggaaatcacggccgcggagttgcatgggctgccagccgccttggacagaaggctgtggtaagaatgccaaagggaaccaccaagacaagatttgacaacattgccaaagaaggcgcaactgttactattgaagaatgcaactatgatgactgtgtgagaatggctgctgccgaggctgcaaaaacagaacacggcatcattgttcaggatactgcctgggacggctatgaagaaattccttcctggatcatgcagggttacggaaccatggtcatggaggcagatcagcagttaaaggaacagggtgtagaacgtcccactcatgtatttgtgcaggcaggcgtcggttctcttgccggagcagtggttggctattttgctcacaaatacaaagagaatcctccggtaatggttgtatgcgaagcagccgcagcagactgtctctatcgctcagccgagaagaaaaccggagaacttgtaaacgtaaccggagatcttcagactatcatggcaggtcttgcctgcggcgaaggaaataccattggatgggatattttaagaaatcatgtaaccgtatttgcatcctgtcctgactggatgagcgcaaaagctaccagaatctacgcaaacccgcttgagggagatcctcatattgtttccggagaatccggctctgtgcctctcggtctctgctacactgcccttcatgacaaagatgcagaagatctgaaaaaggctctgaagcttgatgaaagctccaacattcttgtaatctccacagaaggagatacagatccggtacgctaccgtgaaatcgtatgggacggactttacggaacagaggagtccttcagcgaataactgacggaaatcagcctgttctttacagtgatcatcgggtcactgatacaaaacaaattctaattttatcaactgatttattatgggaggtatttacaatggattatgcaaaaattaacgaagcggctcagaactatctggaggacatgaccagatttttaagagcaatcgtaaaaaatcccggcgaaagctgtgatgaaaaagctcatattgacacaatcgccgctgaaatgaaaaagctggattttgaccaggttgtgatcgatcctcagggaaatgtaatcggctacatgggaaccggagataaaatcattgcctacgatgcacatattgacactgttggtatcggcaatatggaaaactgggaatttgatccatatgaaggctatgagactgatgaagaaatcggcggccgcggcgtatctgaccagtgcggcggtatcgtatctgctgtttacggcgcaaggatcatgaaggatcttgacctgatccctgagggatgcaagatcatggtagtgggaactgttcaggaagaagactgcgacggtctctgctggcagtacatcatcaatgaagacaaggtacgtccggaatttgttgtttccacagagcctactgacggcggtatctacagaggacagagaggacgtatggaaatccgtgttgacgtaaaaggtgtttcctgccatggctctgctcctgagcgcggtgacaacgccatctataaaatggcagatattcttcaggacgtacgcgctcttaatgaaaacgatgactctgatgaaacagagatcaagggtctggtaaaaatgctgaacccgaaatacaatccggactgggaagaggcaagattccttggacgcggtaccatcacctgttctcagatcttctacacctctccaagccgctgtgcagttgctgactcctgcgcagtatcccttgacagacgtatgaccttcggtgaaacctgggaaagctgtcttgacgagatccgcaaccttccaagtgtgaaaaaatacggagacgatgttgtggtttccatgtacaattacgaccgtccatcctacaccggatgcgtatatgagatcgagtgctacttccccacatgggcaattccgaaagatcacaaggtaacaaaggctcttgaagatgcatacaggaatctgtatggtgaaacaagacttggaaacacagagacagaagaaatgagaaaggcccgtcctcttacagacaagtggaccttctctacaaacggcgtttctattatgggacgcaacggaatcccgtgtatcggcttcggccccggagcagaggcacaggctcacgcaccgaacgaaaaaacatggaagatcgacctggtaagatgcgcggctgtttacgcagctcttccggcttcctactgcaagtaagaataatatctataatataaataaggagatcatttatgaaaactttacaggattatattgacaaattaaatgcactgaatttcaaggagatgtacaataacgactttttctggacatgggataagacagatgaagagctggaagctgtttttactgttgcggacgctctccgttttatgagagaaaacaacatttccacaaaggtatttgagagcggtctcggaatttctattttccgcgacaactccacaagaacccgtttctcctttgcttctgcatgcaaccttcttggccttcaggttcaggatctggatgagaaaaaatctcagatcgctcacggcgaaactgtccgcgaaacagccaacatggtttcctttatggctgatgtgatcggtatccgcgatgatatgtatatcggaaaaggccatgcttatcagaaagagtttatggacgctgtaactgagggcaacaaagacggaatccttgagcagagacctactcttgtaaaccttcagtgtgacgtagaccaccccactcagtgtatggcagatatgcttcatatcattcatgagtttggcggcgttgagaacctgaaaggcaaaaagcttgccatgacatgggcttactctccttcctacggaaaacctctttctgttcctcagggtgtgatcggtcttatgacacgtttcggcatggatgttgtgcttgctcatccggaaggctatgacgtaatgcctgaggttgaagaaatcgcaagaaagaacgcagaagctaccggcggtactttcacaaagacaaacagcatggaagaagctttcaaggatgccgatatcgtttatcctaagagctgggctcctttcgcagctatggaaaaacgtacaaacctttatgcagagggtgattttgacggcatcgacaaactggaaaaagaacttcttgctcagaatgcacagcacaaagactgggcctgcacagaagagctgatgaaaacaacaaaagacggaaaagcgctttatctccactgcctgccggctgatatcacaggagtaagctgtgagacaggcgaggttgacgcaagcgtatttgaccgctacagaattccgctttacaaagaagcaagcttcaaaccatatatcattgctgctatgatcctgctttccaaatttgaaaaaccgcaggatatcctcaaaaaactggaagtaaaagcagccccgagaatccttaaataaatcattctaaaaagcgacagggcctgtggagcattgttctgcacggcccttctctttttcccaatcaggaggtttttacatgtataaacggaaacgtattgtcattgctctggggggcaatgctcttggaaatactctgccggaacagatgatggctgtaaaaacaacagcaaaagctctctgcgacctgatcgaggacggacaccaggtggttgtggtccacggaaacggtccccaggtaggcatgatcaacaatgccatggccgctctttcccgggaagacgccagccagcccaacacacctctttctgtatgtgtcgcaatgagccaggcttatatcgggtatgatcttcagaacgcgctcagagaggagcttcgcaaaagaggctttgtgcgtactccggtcgttactgttgtaactcaggtgcgggtagatccggacgatcctgctttccagaatcccagcaagcctatcggacattttatgtccagagaagaggcggaacacgcggaaaaagcctacggctatatcacaaaagaggatgcaggccgcggttaccgccgtgtagtggcttctccgaagcctgtagagattgtggagcaggatgccatcaacagcctggtagatgccaataagatcgttatctgctgcggaggcggcggaatcccggttactcttcagggagatcatctgaagggcgcttccgctgtgatcgataaggattttgcaagcagtcttctggcaaaagagctgggcgcagatatgctgatcattcttactgctgtggagaaggttgccattaatttcggcaaagaaaatgaagaatggttaagcgatctcactgttgaggaagcgcagaaatatgtggacgaaggtcattttgccgcaggctccatgcttccgaaggttcaggcagctatggattttgcttcttccggatccggccgcacagccatgatcacacttcttgaaaaagcaagagacggaatccagggaaaaacaggaaccctgatccattcataaacttttatcatgccatctgtaataaaaaaggagactgcaggaaagcttgacctcaatggacaaaagctttccccggcctcctttttctgcatttattttgcagatgcgtgttttgcggcttcctcttctaccaggcgcacagcctcctcagacggattggagatcactgccgctgcaatgatctcacagggcggatttccttttacactgtctactgccgccgtaactgctgccacgtctccgcttaaaaatacggttgtatgaccgccgcatttggtattccaggtacgaaaggctacctctgatgttttcagcatctggtcgatcaccagaatcgcattgctgcttcccagaacctctaccagtccgaacgctccgtatctcataatgatttcctcactttgttatttatttgtttactgtcattgccagggctgtttccgtatcagccgtcggagaagcgatcactgtatgacttaccacctgtcccaacggcttagctgcctcaagagcaacctccatagcagcattcacatcagaaacagagcctctcattttcacacaggcgccgcttttcagtcggttacgctccacactctggatcgttacatttgctgctttggctgcagcgtcaagagccacaaagcaggcaaccagattatccagttcaaatactcccactgccataccattgtaatttttcgccataatacctcccatgatgaaacatcaagaactttttataattgtatttatgataagtatacctgtttttcttttaaaatacaaggaaattcaacaaaaaatccctgtaataatgtggatttgtgttactgttcacaggttactgtcccgcaaggtgttttggcatgtatatgcaaaaatcccgggacacacagggcaaaatgccatcaccgaaggcgatctggaatacattttgatcaggttactgttcaggagacattttcccaagctgatgcaaacagagtaagcagtggttttgggggtgttggtttttgttggtttccatctgtgaaatgatgcagattattaccaaaaacagcttaacaaaccgctgtgcatgattttacaggatgcttacggaaggtctggtcttgtttttcataaaatttgttatataataatttccagaaatataagacggctatctgaaggctttatctgattccagttctcatggagccccgtcttttgtaatcaaggagtctatttatgaaaattcatcagacagatttttcaaagggaaatgtaaacagaaatattctggaagtggctgtgcccatgaccatggcgcagattctgaaccttctttataatatcgtagaccggatttatatcggaagaatcccggaggcaggcacaaccgcgctgaccggcgtgggaatctgttttcccatcattactctgatcactgcctttacctatcttttcggaaatggaggaagccctctgtgctccatggaacggggcagaggaaatcacagagaagcagaacgtcttatgggaaataccttttccatgcttcttcttacgggcgtgcttctgatggctgttggatatcttttttatgatccactgcttcacgcctttggagccagcgacattacctacccctatgcccgggattacattcagatctatcttctgggcacattgtttgtaatgatcactcttggaatgaatccttttattaacaaccagggctttggaaatatgggaatgctgactattctcattggcgctgtgctgaatattattctggatccgctttttatttttgtttttcatatgggagtaaaaggcgctgcaacagctacggttctttctcagatgtgttctgctttgtgggttctgaagtttcttacaggaaaaaaagcagttctccatctgaaaaaagatgccatgcgccttagctggagccgggtcaaaagcattatgtctcttggaatctccagttttatgatggcttttaccaacagtattgtacaggttttctgcaataccacccttcaccagtacggcggagacctctatgtggggatcatgactgtgctgaattccatccgcgagatcacaaccactcctgtcaacggcatcaccagcggttcctcacctgttatgagcttcaactatggagagggcgcctatcaccgggtacgaaaagctatccggttcgttaccgttctctgtgtttcttacacactgatcatatgggggcttctgaagctgtttccggaattttttatccgaatctttaacaatgagcctgagctgatctccagagggatccccgctctccatatttactttttcggctactgctttatggccttacagtttaccgcccagtgtacctttgtggctcttggaaaagccagaaaagcaacctttttctctattttccgaaaggtactgatcgtagttccccttactgtcctgttgcccgggatcgggaatctgggcgtggacggagtattctgggcagaacccatctccaacctgatcggcggctgcgcaagcttttttaccatgcttctcaccgtaatgccggagcttaaaaaaggagcaaaggggaaataaaaaaccagctttatgattctgattttccatatttatggctttatgaaatatccggagggatatccatatccgtaagctcttttttatctggcacttccagcagagccacatcctgcatgtattttctcatcacccttttccctccggtatcgcctgtcagagccagaagctccgggtaatattttccggaaaaaatacagggatttccaggctgtccattttttgctgcggcagccatgcccttttcggattctgtatacatcctgatcagagcttctatcgtatggcaccttatccacggctgatctgccaccagaaaaaggcaggcattattttcccggcaggcagaaaagctttgcgcctgaggcttttcttttattacttccagaagccccagcttcatagatgaggaaattccttcttccggatggggattccataccacccgggctcccagagcctctgcattttttttgatctccgaatactgagtaacaagaataacggaagaaatcctgtgtttcatttttttttgtaccagaagaaccttctgaagtgtgtgtaaatacatgggaatgccatctattggaaaaaacagcttgttgctgccaaatcttctgctgtttcccgccgccagaataacaatagaaatatcctgtttcaggctgccgcatacggcccaaatgccatgttttctcagtctctgtactattttatccggcaaattcctgtcactaagaacatcctctttatttaaaaacactcgaaatcctctgtgtcccacggacttacgaagtccctggtctgactttgcaatccgtatgatatcttcctccgtaatcttttcctttgaagatttacccagaaattctgccgctgattccggtcggtgaactgtgtctttgattgcttttcccagacagtccagtccaatcacgccgatcacaagatcggtcatctccggaattaccggctcccaggctgccggaacctttaaaggcagacgtctggctccgtctgcctcaataaggattacatcacattcttttttcagttcctgaagctgctcctccggaagcgcctgaagctttcctgtaaacagttttccgcttttgttctgctcttcggaagcgctgcagtgcgtacctgaggatccctgaatattttccggatttttccaacttttttcttcccgtttttccatacaggcagctaccgtatagccgtactttctgagattttccctgactttattcagttctccgtctctggcaaaggggcgttccggctcaaaagctatgtgagtggtggtggtaacaatgaccttttttccctgctctgccagttcctctgcaagccggaagatcaggcttgtttttccaccgcctcccacaactgaaatgatctttttgctgtttacatcaatatccagaagttcagtaagtctcataatcctgttcctcgatcacctgataattgtattcctgccttttcctctccggttaaagcatccgtcatacagcaggcaggtttcttcctctccttctgttcagggaacaattccttctgacagaagaatttccacaacagttcccgctatgcatcttgctttatcagaaatggtattgcagttttttttctgttctttccgtgggtcaatatccgcgatcttcattccttccgatacctgatactcttcccggatcattcctcttaatactcctgaaattgtggcaaagacaggaatttctctgtttttctctgtactgatgacagcaattacctgatccttttctaccagatcgctgatcttcgcccggctgtgtatcgtacccgctgccggagaatgaatcactcgttctttcccataacctccgatcattcccggaatccctgtattgggagctgcccagccctcttccacgatccttccaagatcatggcctctctgagtctccaccacataatccacatctctaccggccagaaacccaggtcccagagcaatggtaagaggcgccattgccctgtttgtgccgagatttttttttgcaagaatagcgtcgatcactgctgcaggatgaagttttttgatagcttctcctgtctcatctaccagaagaggaatctcgcccatttcccatattccggcacactcacccacatcctggatcctgtggcttaaaacgccctccacaaatgcctctccgtcataaacagcctcgcagaaagacacctcccggcggattgcgctgggtctggcgctttcaagaatcagcacccggtatccgcagcggtaaagtctgtggatcactccactggcaagatcaccgcctccgcggacaaccagtatgttattctgtgtcataaatcaaactccttcagtctcctgctgttcaagcattactttttctactgcatttacaatattctggtatccggtgcagcggcacagattacctgacatgtgttttttgatagcttctcttgtaagcacctcgccccgctccagaagcaccgttgcagacataacaaagcccggtgtgcaaaaaccgcactggatcgctccctcctcaataaaagcctcctgaatacgggtaagatccccgttcttttccagaccttccagggtacggatattttttccctccgcccacactgccagataaatgcaggagtcaatagtctctccgtcaatgatcactgtgcaggctccgcattctcctacctcacagcctttttttacggaagtaagacccagacggtttctgagcatgtcaagcagagactctctgggatccacatactcggctacttcttttccgtttaccacacatctgaccagaactttatctttgatcattttctgtcacctcctgcaagctctatggtacgcttcagcgctctttttgcgatttctccgccgatctgcatacggaactccctggatgccctccaggaatctcttgggttgatctcctgacggatgctctgctctgtcatttcatacagtttttcgctgatttcctgtcctttcagcgctgcttctgttttttcacaccggaaaggaaccggagccgctacgccaaaggtaatgcgcacatcttccagaatatttttttctgtatttaccttacttaccacggaacagcttaaggttgcaatatccatggcttttctcatggaatacttaatatagtttccatgataaccctggtattcctttgcaggaatgatcacatgggtaagaatctctcctcttttcagatccacacggcccggacccaggtaaaaatcacggatcggaacggttcttccgttgtttccatcctcaatgcgaagaagggcattcagagaaaataccgtaggcgcgctgtctgcgctgactgcaccattacagatatttcctccaatggttccgatattcctgatctgaggtccgcccacctgatctacagcttctcccagaaccggaatgttttcctgaatcacagggtcattggtaatatgggaaaaagtagttcctgcgcctatataaatatctccgttttctttttttgtgataccgttcagttctttaatgtcacggatactcacaagagaggttcctgccattttcccttcccggatcttaatcagtacatcgcttccgccggagatcactctggtatccggatgttcctttaaaagcctgacggcttcctctattgtgctggcattatagtaattttcaatatcatacatgattccgttccccctttcagatcagtccggcttttttgaatccctcgatcagccgctgaggcgccagaggaatttcattaaatgccacgccggtagcatgaagaaccgcgttacggatcgcaggagctcccggaattgcaggcggttcacctaaagctttgtttccgtaaggtcccatggggtcatccagttccacaaaatctgccttgatatccggtgtgtctaaagctgtcatcagcttgtaatccagaagattgccgttaagaggccgtcctgttttttcgtccagaacaagctgctcgcttaatccatagcccatgcccatggacatgcctccgtgcacctgcatctgggcaagctgcggattcagaagctttccgctgtcatggacattgatgatgttaagaatctgtatggttccaagcttcatatccacttccacctctgcaaagcagcagcctgtggcaatggtatttttcttcacctgtgtggacacctctgctgtcagcacagaggaattgctgagactgtaataggcttcctgtgccagcgcctccagagaaagtacctgttcctctcctgcgtagatccagccgtgatccagagacagttctcttgtctcctgctccggaagaagggttttggcatagtccagaatcttttggagaagctgttctgcgcactgcttcacagctgttccggtaacaaaggactggcgggatgcatatgcgcctgtgtcaaacggcgtcacatcggtatcctgtactgtgacaatatggacgttctccacatccatgtgaagtgtctctgccgccatctgggaaaagacggtatctgctccctggccgatctctgtagctccgatctgaagctgaacgcttccgtcctggttcatggaaagccgggcgcctgcaatttccagtgaaatgggccatacacctgtcttataagaaaacagtgacatgccaatgccccgtcttacagaacctgtctgatctgcatattcttttcgcttttcatcccagtgaatatattccgcgcctttttccaggcactggaaaatcccgtttgtattggctgcaataggcttcagataagcgtcctcataatatccctgaatcagatttttccgccggaattcaagaggatccgtatgaatctccgccgccacatcatccatcagacattcaatggcaaaggctgcctgaggaatgccgtaggcacgcatggctccggctgtaggggtattggtataaatggtataagcctcgcctctggtatttgggcaggcatactgaagtctccatgcagtaagaccgttggcggcaatggcgtgaccatgggatgcataagccccctggctggaatatgccttcatatcttttgcaagcagatgaccttccttatccacgcctgcagtgagatcatactcaatagaatgacgggttcttgtattgcagaaggtttcctctctggaaacctcaagctttacaggacggccgcctacctgagtagtcaaaaatgcattcagaggctcataaagcacatcctgcttgtttccgaatccacctccgatatacggtttgatcacccttaccctgccccaggggattcccagagcctggccgatcacacggcggacaatatgagggatctgcgtggaagtaactacaacgatccttcccttttccatataggcaaaggatatgggattctctatatgacagtgctggacaatggaggtcttgtagcttcttttcacaactgtatcagactgctccaggccttcatccacgtttccgataaaaaagttggaacgggcaagtacattgtcttttttatcaaaatgaatgggaggattgcttccgtacatggattttctgggatggatctccaccggatattcctcatattcaaccttgatcagcttcagcgccctggacgcagttacttcatcttctgccacaacggcagcaatatcatcgccataatagcggatacgtcctgtaaggatatttctgtccgcaatatcctgatgagcaggctccacagaccagggatgtcccggtgtgggatagcagtgatccggcacgtctttaaaggtaactacctttaccactccgggaagcgcctctgcctcactggtatcaatagatgttacgatcccgtttccaatggtggagtgaaggaccttggcaaccagagcgcggttgagaatcagatcatctgtaaattttgctctgcctgtaactttttcataagcatctactcttggaatactttttccaaccatttcttcaccttcttttccttttctacatgaattctcccagactgtctgagatttccctgaagcttttagaatatggaaaaagccagactgcgtccagggagtgtgtgttcccctcaggacgtatgtccggctccgaaccatgctactttcttataatatgtatcctgagtcagaataagaacatcaggaaccatttccttttattcattttaacatattataagggttttttccattgatttttagtgttttttcttgaattattttaaaataatccctcttgtatcccggatcacattccgcggacattttaccgcgcagtttccgcaggcaaggcagagctcgtcattgatcaccgccacattgtcctgaacctccacagcgtctgccggacagtttctggcgcagatcccgcatccgatgcagcttgcttcacaggccttttttgccgctgctcccttatccttattggaacactttacgataaaaggattgtctgtcagatgaatatggatgatttcctgaggacaggccttcacgcagaggccgcatccgatacacctgctttcctcaatttcagccacaccatattcattataaaaaaccgcgtcctttctgcagacctcaatgcaggaggaacagctcatacagccgtatgtacagctgtggcagcgttctccgccgtcacatgcaacataagctgtctttttcggaaatcttgccatagatcattccccctttttctttctctcatacggcgtattggcaagcggaaggcttgtgcggtactgaccgtcatatttatagtaagcccctgctatagccggcgccgtaggaatggaggtgatctctccgatgccgatggctccctctgctacctttaagccttctttttctacaatgatgctttccacctccggagcctggtttgcccggaaaagtcccagcgttccatatttattctgaggtctgcagtccttcagtccatactgctctgtgagagcaaagcctgtggacatgagcactccgccctcgatctgaccttctacagaaagaggattcactgcccgtcccacgtcgtgggctgccactattttttcaatccttccgtttttatccagaatgcacacctgagttgcgtacccgtaggccacatgagaaacaggattttttacatcagaacccatggcgtctgttctggcaagatattcgcccagatattcctgtccctccagctcctccagagttttataagcaagctcttctttcagcttctcacaggcgcgacggcaggcttcccctgtaacaagagtctgtctggatccggaagtggttccggaatccggcgcattatacgtattggaagcatcataataaatctgctctcttttcagtcccagcttttctgataccatctgtaccagtaccgttccaagtccctgtccaatgcaggaggctcctgagtggatctctacttttccattgtgcacatacagcttacagcgtccccagtccggaagcccgacgcccacaccggcatttttcatggcgcaggcaattcctgcataaggatggctgtcatacactttctttaccgcttccagagtctctgcaagtccggtggaatcatctacaagctgaccgtttggaagctcctgtcccggacggatcgcgttgcggtagcggatctcccagggagaaatgccaaccttttctgccatttttgtaagaagcatttccactgcaaagcaggtctgggtaacgccaaacccgcggaaagctccggcaggtggattgtttgtatagtaggcttttccgtcaatatcaaaattctggtaattatagggaccggaggcatgggtacaggctctctgaagcacagggcctcccagagaggcataggctccggtatctgctataacagctgctttcacaccctgaatgataccgttttcatcacagcccatagtaaattccatgtccatggggtggcgtttgggatggatcagaatactttcttcacgggtaagctttacctttaccgggcgtttggtaagataggcgatcatgcctgcgtgatgctggaccgtcacgtcttcttttcctccgaatccgccgcctaccagcttattgcgcacctttaccttttcagccggaagtcccagaagcgccatacattcatgctgggtatcgtacacaccctggtctgaagaataaatgatcaccccgtcctctccgtccggctttgccacagcgcactccggctccagaaacgcatgctctgtccacggtgtccggaatttttctgtaagaacataggcggatccggcaatggctttttccgcatcgccacggtgcacgtgccagtgggccagaagatttccgtcttcgtgaaccagaggagcatcctctttcattgcttcataaggatcacgaaccatgggcagttcttcatattctactttaatcagctttttggccttttccacaagctccggtgtctctgccgcaacaagagcgaccgcatctcccagataatgagtgatctttccaacagggatcagtccgtcccagtcctgcttcagatgccccacctttacgcttccgggaatgtcctctgctgtaaaaaccccgatcactccgggcagcgcttttgccttttctgtgtcaataaattttaccagagctcttggataggcggaacgaagagcgcttccgtagatcatgccctcctcatagatatcgtccggatactggccatagcccagaaccttttcacggacatccactctgggcacacgctctcccagcttccaggcatactccctcttttcgggaagtccttctcttttatattttgcggcaaggagaataccgtctatgatttttttgtagcctgtacagcggcagatattgttgcggatcgcatgagccgcctgagcgcgggtaggatccgaattctggtcaataagccccttggcgctgatcaccatgccgggaatacagaatccgcactgcactgcgcctgcttctccgaacgcccggtcataaatctctttttcttcctcagaaagtccttccacagttataatatgcctgccttccatcatagaaagagaaggaatgcaggccttctgcgctttcccgtcgatcagtacatgacaggttccgcaggcgccttcgctgcatccgtcttttactgaagtaagatgaagcttatcacgaagaaaacgaagaagcttcatatccttttcttcctgatattcctttccatttacataaaaactgaacataaccttcctcctgacatatattcagcacgagcgcgtccctgcacaaaacacagagacacgctctttttcacttcatttcagatcctgtaatcatttaaacagcagataggaataatcgtcgatcactgcacagatcagcgcgcggattccgcccggcaccttatcttccggatcgtctgccttacactctgttacatttccaaggaatctcactctgcattcctttgtgtctgcattcagtacagcaaatccgtcatttgtgctgtcatccatatcctctggttttgcaaacagtgtaaatttatctttgtaaggagcgcttgcatacggacagaaggtcctgcagtttccgcactcattacacatataatccacgtggatcacctgagccatttccattccgggtactttaacggagatatttgctctgtttggacatacatccacacagttttcacataccttgctgcaggaaagacatcttgcactttcttttgcagcgtccttctcttctttcagaacgcctttcttttcatagcactctgtttctgtacctgtaactgctctgtcagaaacaacttctctgccaaggattgcttttgcaacaagctgtgcgtcgcggatagcttccacgatagttgcagcgcctctggcgctgtcgccggccagatatacatcttttacgcttgtttccagagtttcctgatcaagctttgcttttcctctttcatttacattgatgccgttggcctcatagaactctgcaggcactttttctccaacagctacgatcacagtatccgcaggcacttccaccatctcatctgtctctgtaactcctgctcttccggaagcgtccattgtgccaagctccattttcctgcagataagagttccgttttcaaggcttaccggagacagaagctctttaaactcaacgccctcttccagaacctccagaagctcctcctctgctgccggcatgtagcgttttgttcttctgtaaaccagatatacatgctctacgccttctgtacgttttgccgctctggctgtatccatggctgtatttccgccgccgattacaacaacgttctttccaagatccacttttccgtcatttgacttaaagtcggcaaggaatttaagggcatttactgtctcgcctttttccagcttcagtgttcccggtttattcgctccggtggcaacgatcaccgcgtcatagccctgcgcttttacatcagccacagaagtgatctcggtatttgtgcggatttccacacccattttttcaataaaggaaacgtctttgtcaatagttgtctcaggaatacggaatcccggaatcacataacggatcacaccgccgagttttgcttctttttcaaaaatcgtcacagaagcgcctgctcttgccaggaagtaagctgcagcgatacctgccgggccgccgcctacaatggctactttctttccgttactctctccggcacggatctcgccgatcacctcgtcatagccgttctctgctgccagaagctttgttccgcggatatttacagactcatcataaaagtttctggtacatttatacatacagttatgtgcgcagagagttcctgtaataaacggaagggcatttttatcaaggatcgcacgaagcgcgtccgcgtatttttcctctcctgcaagcccaatgtattccggaatatcctgatgaatgggacatccgccctggcatggagcaaaataacagttcagaagcggaacttcctcctcattttttctgtttggaagaggcttgatattttttacatggcgaggatctttctttgcgtcctcagccagcttttcaagagcctccacgtcaatgccgtcccatggcttcactccgtccgccatgatcttttctgccatctgggagaatctctggtatcctcctgtttttaaaatggttgttgcaactgttaccggccatacgccgcagccaacgatcctgtcaatattataaaaatcagctccgccggaatatgcaatacggagttttccgtcaaattctctggaaagctttgcagccagagaaatagacagtgggaacagagcctttccggacatgtacatctcttcgcttggaagctcgtttctggttacgtctaccgggaaggtgtttgtgatctttacgccaaaggcaaggcccagttggtctgccagcgcctggagacgtttaaacatcgggacagcgtctttatactgcaggtcatccaggaaatggaaatcgccgaatgccatatagtcatagcccatttcatccatggtctttctggcaaattcatagcccagaagcgtaggattacatttgataaatgtattcagatgtttttctttgtaaagatgatttgcaatgctttcaatctcatttggaggacatccgtgcagggtggaaattgttgcagaattacagatctctgacggaattgcttcaatatcctcttttgtcacatgctcaaactgatccacatggtcaagaagccatgttctgcactccttaaatacttctgtatccctagcttccttcatgcagttgataaaagtatcaatcttttcttctttaattcctgcaagatcatagcctacggaaatattaaactggaagccgtctgttcctccaagaccaaactcctttgccattacatgaagaataaaccatgctttaatatattctcccatagcctgaggcacatagagctctgtggaccactcgcagttatagcattcgtcctctgccaggatacaaggacggttaatgcaggctgccagctcatcgccgtccattttctgaacagttttcagctcaaagaatcttgctcctgcatagtaggaagccacaatattctgagccagctgtgtgttggggcctgctgccgggccgatgggagtctcaagatttcttccgaaaatctccatatcctttgccgtatctgcctgataagccctgtgtacgccaaatacagttcctttttccttatgttctgttaaaacccagtccattaactgtccaaaagacatacaggtcattttttcactcataattatcctcctgtcatccggtttctccggtcatttttcttattttccgaaattgatatcatctgcaagctcttttgcggactgacggcagtctgccatgatctttgcctcgtcgcacacaagaacttcacgatccttcatcagaacctccccgttacatactgtagtctgaaccatgcttccgtttacgccgaacagaagatgtccgttggtgttgtctgcgcgcattggcgtcagaggatcatatccgatcacgatcacatctgctgcggctcccggcttgagaacgccaagctcttttttaaagtaacggttggcaatttttgcatttccctcaaaaagcatctgcggaacctcgccccatgctgcgttagggtcacagagatgatgtttgtgaagaacgtttgccactttccaggactccatcatatcatgagtatatccgtctgttccaagtcccgtaacgattcccttgtgtaccagagccatggtaggagggcatccgcaggcattgcccatgttagattccggattatgtactaccatagtatctgtatctttaatgagatccatctcatgttcattaatataaatgcagtgacccagaagagttttcggtcccagaatattccagtcataaagacggtcaacaatacgcttgccatgctcctttaaacactgatgaagatcatagatcccctctgcaacatggatgtgatagccgacgccctccggcttaagctcattgcacagctccattgtctcatcagagatggtaaaggatgcatgcatacccatcattccggcgatcatatcgctgtcatctgcaagagcatgtttgataaagtttacgttttccataacagattctctggatttttccattccgtcacggtctgagatctcatagcagagacaggtacggattccaagatcttttgccgcttcctcaatggcatttaaggaacctgtaatatgtccgaagcttgcatgatgatcaaaaacagttgtcacaccgttttttatagaatcaatataagtagcataagcggaaagctttgtctgttccagagtcagatgacggtcaatggtccaccactgtccgtccaggatatccagaaatccctgaggattgtatcctttaatactcagtcctctggcaaaggagctgtaaatatgttcatgggcattgataaacgcaggcatgatcactccgccctttgcatcaataaactctgcatccggataagctttttttacttcttctgttccgcctgccataacgatggtgcttccgtccattgccactgcaccgttttcataaaaggtattggacgcatctcgtgtaatcattcttccatttccaacaatcttcatattaaatcctccctgtcttgtaaaaatctcccaactgtatacaaatttcatcctgtcattttaggaattttatactattaatgtatcacactttttcctgtatttcaatagtaaatctaaaaaacatttttttattctaaaaatttttgtatatcaagtattgtccgctttccgggtcaatacagaattatattccaggagtttctctgcaataaaaaaactgttccggcagatattccgcatatttttcatggaatattttgccgcaacagtttttataattcatttattaattccaggacttttctgttccggttccacaaaaccggatctgccttcaccggatatccgcatccgttttttacatgccagtcataaaagcttcgccctggatatccgtaagcctccataatgttcataatggttcccccgtgaaccactactgccgccctgctgatgtgactgcggaaacaggcacttacaaccctctggaacccttccagagtacgtttctgaaattcttctctgctttctccatttggaaaaggcagaatcccaccgctgtctacccaggcctgataatccggatttccggataattccagatagtttttgttctcaaagtccccaaagtcacactctgcaagctggtctatgatcctcagccttttttccggaaacaggatctctgctgtttccctgcaccgcacaagaggacttacgaatacagcttccggctccggatagaaaaattccttcagcttctctttgccctcttcacacagaagttcgtctgtttttccaatatacctctgataacggttcccttctgtcattccgtgacggatcagccatatctcagtcatgtttgatcaccgtaccgataccgcagaccactctggttacttttctgctgaaggaagcaagcttcgtacatgttcttcccacaacctcccggtaagctctctgaaaagcgtcaacaggaaccactccgtatccaacctcatctgacaccagaattacctccgggtttttccggatcagctcttctgccagagcttccacggagcttccttgttccatttctttttttataaattcatgaaagcccacaacgcccctggcggaaaaaagttcttctctggagatttcgtttccctttacccaggaaattcccggatacattttttctgcaaaagctgcctttccctgaaaggcgcctccaattaccatttccatactcatccttctcctttacctatataagaatcactgacagcgccgctgtcaccagcactattgccagctcacagagacagagaaaccaaccggaaagatcccctgtagttccgccgaaatacttcattgccatatatctgtaatatgcaaaaactcctgctgccgcaaaaaaagccgctgttcccataacaggctctgtccggatcataagcgctgcaagaatgatcagataacagatcagagtgtttcgtaccggaacgtcctcggatttttttgaaaattctgcaaccgttccatcctctctggcctttggaagagtgatcacacccagtccggaaaaacatctggataccataaatccaaaagcaacgatcatcatagcctgtctgtcaaagcagatctcgctgtacgcgccaagccagcagagaaaataaacgcctgccgtgatcactgcaaaggctcccgcattggaatccttcagtatttccagccgtctttttcgttcctgccaggagcttaaagcgtctgcagtatccagaagtccgtccacatggatccctcctgtaatcagaacaggaagcactgtcagagccacagaaagaaaggttacgttaaatcccagataattggcaagccatgcggccccaagagaaacggctccgatcactgcgccgataaaaggaaaaaaacagaacatgtacttcatgttttcctttgtccattctgcctggggcaccggtattttggagaacatggcaaaggcaatcttaaagctgttccacagacttttcatggaaatcccctccttttttatgatatacaggaattccatagacaacctcaacaaccgaatctgccattattcccagacgctgattgacctttccaaggactttctgataagcttctgtctccccttcataagaagcagcctcggaaaaaatctcatttgttacaacaataagattttctgcctgtgttttcagatttcggattcccttcagaatttctacttctgtattctcatgagtgccgtcctcacggaaaaattcatttgccacaaggttggacatacactccagaagtactatacacccttccggaaccttcacaccggaaagtcccgtataacattccaccgtttcaaagccttttccaaagcgcatatcccgatgtcttttcacccgttttctgctttcctcatcaaagggatacatggtggcaatatatatccggggcatttctccgcaggcaatcacgcagtcctcggcaaaggcagatttgccgcttccgcttcctcctgttaccagaatcatcatttataccagctcctcatactgctctactttgatctcctcaaaggtactcatggattcataaactgcaagtcccatatcgataaacggaaaaagagccactgctccgctgccttctcccagacacatttctccgtgaagcaccgcttctttttcaagcgcctcaagaatcatggctgccgcaggctctctggatacatgagaggcgatcatatagtcttttgtaagaggagaaattctctgagccacaagagcagccacacaggaaataaaaccgtcgatcacaaccgggatccggtaaacggctcctcccataaatacgcctgccattccggcaatgtccaggccgcctacctttgccagaacatctaccggatcagagggatccggctcattaagctttacagctcttttgatcgcatcaattttccttttcagtccctctccggaaagtccggctccccgtccggtcatttcctccaccgaacgatttaaaagtacagaagccactgcgctgcttgtagtggtatttccaattcccatctctccggtggcgatcagacgatagccctgctccttcagtcttctcaccatctcaatgcctgcctcgatcccctgtactgcttcctcataagtcatggcaggctcttttgtcatgttccgggttcccatcatgaccttcagatcagaaggaacctttgtatctgaagccatgcccacatcaacaggaaatacatctgtcccgcactgtctgcacatcacgcaggcagaggtgtctcctttcaggaagttttctgccacaatggctgttacctcctgtccggtctgggtcacaccttcctccaccactccgttatctgcacacatggctaccagagctcttttatccagacgcacatccgcggaacctgtaatacccgcgatctgcatcacgatcttttccatttttccaagtgaatgaaggggctttgctatgctgtcccatcttttctgtgcagcgcagaccgcttcctgatccacaggtctgatctgcttttttgcttcttctaatgtcatttttccgccttcccttctttatcctttttttcctgttgtaaaaacaaaaaatttactgaatatgtaattaagagccagtacaataaactgcgtgataaattttcccatcatatcattcatacgcaggatctccaccagaagccatacgcctcccacctctatgaccatagtcaccagacgggcgctgataaatttcataaaaggctgaatgtgatcacgcagagtctcgcatttgtcctgaaaaacgaactttgaattcaccacataggcaaaaagaattgcggcaatgatagagattatatttgccactgtaagctgcagtccgcattttctcagaacataaaagcttacaaggtttaccagggtggtgcagcctccaaaaaacacatatcttaccacgtcattcccgtacagccgggcaatcatttttctgatcttttccattgtttactcctgctttttactgtatgtttttctgtccggaaactgtcttacacagaatcattccgcgcattttcagatacgtcttcactgcctctgacgatccgggaaataatatagcggggacgccgctttacttcctcatagatttttgcgatataatacccgatgattcccagactgagcataatagcgcttccgatcagaagaagaacgatcacaattgtcgtatagccctccactgcatgtccggtaaaatactgggcaagagagtatacagccagtgcaagcgaaaacaggaagcagatcccacctcctacagtcacaaactgtaagggcactgttgtaaaggccacaatattcgtaaatgcatatttgaccagggaccaggcagaccatttggagactccggcctcccgctcccggacctcaaagctcacagaaatggttttaaatcctacccatgaagaggttgccctgaaaaacatatttctttccggcatggaaagaatgctctctgccgcccgtctgtccatgagcttgaaatcagatgcattctgcatatcgactcccgtggcctttgacatgatcccgtaaaagaatcccgcgcattttttatggagaaatccttcttttcctctgctggactttactccttcgatcacctgatatccctgttcccacaaacggtacatttccaccagggtttccgggggatgctgaagatcgcagtccatcaccgctactgcatccccctttgcctgagcaagtccggcaaataaagcagcttctttcccgaagtttctggaaaagctcactcccagaatattgggatctttctttcctgccttttcaatttcttcccaggtacggtctgacgagccgtcattgaccagtaccagctcataggaaatccctgcatctgtcagcacctctccaagtacggagcaggtttttgcaatcataagctcttcgttatatgcaggaagcacaaccgataaaacactcatacctttggtaccttctttttatttaatttcattcttacaaataccagacaaatgtaacacaggcctcccgccaaagtcaagcagatgccgggcaccagaaacggcgtcctgtattcaagccggagttcatgctctcccttcggaagctccagagccatatacatggtattggcctttttaagctctgtttcctttccgtccacataagcccggaagcccttgctgtacggtacagagatcagaagtcccttaggttctgaaagagaaatatttccggtgatcctgtttgtatccatgcggatatctgtcagaacctcctggttcagcttttctgtctgctttgtaatgcgctccataggctgacatacgattttcagcttatcaaacgtatatgcgcccggcttttcaaacgtaagggtaatggattgtttcgcagctttttcatatcctgtgttgcaaaggaaattatgttttccgctgtaagcattatacttgtctgtaaagatccggatagtcttttcaggaaactgaccgcccactgttattgatgccttctggctttctttccagtatctccagtggctgtcctcatgaagaagctgattctgctcataacgggtcattttattccatttcttttcactgaccctatccttcggagaaaggccgtcataatccagtccctccgcaatcagatacgtctcgctgttttccagaccgttaaagagaagctccagctttgccccttcttttgtaacctttatttttccgtccttcactgtacagcctttgccttttctgatctcaaaaggaatttcctgatcgttaaattccggtgtgatttcaggaagagaactgtcttccagaacaattccctgaagaagcgcctgctgtttttccgtaactgtcattttttcatattcctctcttggtataaaggaatcataggtataccccagaggaagagcctcttcacttccaaatgcctcgtatatttttccgtttttctccgcgcttccctccagccagtaatatccatagggcatatactggtatcggttgctttttacaacaaaatatttcacagaggccaggctgtccagaatcgttcttccgtccagattttcataatgctgctcccagggcgtattcagatacatttcatcaaaaaattctccgatacttccgcttgcaacactgaaataataggaagtactgtttgttcccatatgcatggcggaattttcacaggaaagggcatccagctggtcatagcggtacacagaatcatcctctgtatccagaaccgccagatctgtgcctgattccagggtttccattgcctctcctctgtctgcaaactctgacagataatccttttccatggaatactgataataaatattaaaaaatattcccgctgcaagaagtccgctcatcatcagacagagatttctttttcttacaaagatagatccgtacaaaagaatcactgcagtggaacataccagaagaagcattgcggacatgtttctctgagtgcgggccgcctccgaaaagagagctgctccgcagtaaataagaagcatgacaaacaccttgcgcttttcccggatatccagtcgaaaaagctcaggataaatttttacaaaaatataggcaatcagcattccgtaaacccagatccaccggttggacacataggaaaaaccattgagcacatgcccggcaaagggtaccagaagaaatacattcagaagaaggaaccccgccttcagcgctgtatttgactttttctttgcaaacaggacaaacactcctgtcatagagatcgccgtgtaaccagccactccccattggatcatattttctccgatgagacagcttaaatatttttcatagtaaattctgtcatagaaaagtggcacataattttctgcctgaaaacgtcctgtgccaaacacaggaaggatcacaggcaaaagaatgatcccagccagaagaacagcaatcacagaataacctgcgaagactgccagccactttccaatgcatctgatggttctttccgacttatctgtaaacacaacaaagtagtcaaaggcagcatagagcaccataaaaattccaagcatataaaagaagtagaaattcgatactcctgccagcgccacagaccagataaatacatagggcttttctttccggtaaattttgtcaattcccaaaaggatcagaggaagatagatcattggattggcaaaatacggatgtttcatagccgcataaatcgtccatcccgcaaatatatagatcagagagcccagaaggactgcctgctttgaatttctgtgataaaaacagtatctgctgaatgcaattcccgcaagataaattctcaaaaagatcagaaacgcatacagatattctgttttttccggcgatacaaacacagataaaagagtcaggggatcgccgatcacatagtaatggagcgttgtcagtatatcagacccgtaaccgatatgcatatcccacatgggaatttcaaatttgtgctccacaaaaacagaatgaagaatatttctcagatattctccataataagcaagggaattcagatgctggggcacgccgtcatggctccagatcagtgatttcccgttcagataaaactgcagataaagaatcagtccgataatcccaaaagccagagtatagatcagataataatctgttttcttttctgttgaaaatctttttttcatattcataaattagctttcctttaaaaaagccgcggtacctttgtaccgcggccaaaagtctgaatttattcagcatctgctccgtagagagtgatgagtttgttcagataatcatatctttccttagcctcagcctcgttcttagcaaacagtctttcagctttctcaggattctgacgtttcagagaattgtaacgaacctctccgtcaaggaatgcctgatagtcatccatgttcggagccttggaatccagagtaaatttgttctctgctgccggattgaagcggaagttgtgccagtatccgcacttaactgccagctcttcctctgtctgagccttggacatacccttcttgataccatggttaatacatggagcgtatgcaatgatcagagacggtcccggataagcctcagcctcagcgattgcttttacagtctggttgaagtcagcgcccatggagatctgtgctacatatacatagccatagctcatagcgatggaagccatatctttcttcttcacttctttaccgcctgcagcgaactgagcgatcgcacctgtcggtgtggatttggaagactgtccgccggtgttggagtaaacctctgtatcgaataccataacgttgatgtcacgtccgcttgcgagaacatggtcaacaccgccgaatccgatatcataagcccatccgtcaccaccgaaaatccactgggatttcttggaaaggaagtctttctgtgcaaggatttcctgagctttttcacatccgcatgcttccagagctgctaccagtttatctgtagctgttccgttagtagcgcctacggagaaggtgtcaagccattcctgtcctgctgccttaacgtcttcattttcagcgtttgcaacaagatcctcaactttttctttcaggccgtcacggattgctttctgagcaagaagcataccataaccgaactctgcattgtcctcgaacagagagttggaccatgccggaccctgtccttttgcatttacagtgtaaggtgtggacggtgaggagttaccccagatagaggagcatcctgtagcgtttgcaatatacattctgtcaccaaaaagctgagtgatcagttttgcgtaaggtgtctcaccacagcctgcacatgctccggagaactcaagcagaggctgtttgaactggcttcccttaacagttgtctctttgaatttggcaacaacatcttccttaaccggaagctctacgccatagtcaaagaatttctgaactcctgcatttgcttccatgttttccatggcaagagcttttgcacccttcttgcccgggcagacatttgcacaggaaccgcagcctgtacagtcataagcggaaacagtaatggcgaatttgtaatctttcataccagtcatcggcagagtagtcatgccttccggtgcgttggcagcttcttcctctgtaagagctaccggacggataacagcgtgcggacaaacatatgcacagcggttacactggatacaattttccggctgccatacaggaatgttcactgcgataccacgtttctcatatgcggaggaaccggacggtgtagtaccgtctacataatccttgaatgcagatacaggcagggagttaccttcctgtgcatttactttggactgaatgttgtttacgaaatcaacaacatcttctcttccgttctcagcatgagtcatatgaagaccttcgtcagctgcgtctttccagctttccggtacctggatctcaacaacctgcttagcgccggcatcaattgcagcccagttcttctgaacgatatcatcacccttacgtccgtaagtagctttagcagctgctttcataaggtcgattgcctgctcctcaggaatgattcctgtaagtttgaagaatgcagactgaaggattgtgttgatacgtgttggtcccatgccggtctcaataccgatcttcacaccgtcgatggtgtagaatttaatgtcatggttagcgataaatgcttttacctgtcccggaaggtgtttctcaagtccttccatatcccacgggcagttcagaaggaaggttcctccgtctaccagttcctgaaccatgttgtatttattcacataagaaggattgtgacatgcaacaaagtcagctttcttgatcaggtaagtagatttgatcggttttttaccgaagcgaaggtgagacattgtaacaccgccggacttcttggagtcataatcaaagtaagcctgagcgtacatgtctgtgttgtcaccgatgatcttaatggagttcttgtttgcacctacagtaccgtcagcgccaagaccccagaatttacagtttgtggttccttccggagttgttacgatcggagcgcctgtttccagggacagatttgtaacatcatccacaataccgattgtgaatttctctttggaagtgttctcatatacagcaacgatctgtgccggtgttgtatctttggaaccaagtccgtaacgtccggagaataccggagtatctttgaacttggaatctttaagagctgctacaacatcaaggtacagaggctcgccaagagcacccggctcttttgttctgtcaagaactgtgatctgttttacagatgcagggattgcatcgatcagtgcctgtgcgcagaatggtctgtaaagacgaactttgatcacgccgacttttttgcctgctgcagcaaggtaatcgatagtctcctcgattgtgtcatttacggaacccatagcaacgatcacgtgatctgcatcctcagctccgtagtagttgaacagtttgtagtctgttccgatcttttcgtttactttgtccatgtattcctgtacaactgccggaagagcatcgtagtacgggttgcatgcttctcttgcctggaagaagatatccgggttctgagcagaacctctctggcatggatgattcgggttcagagcgtttttacggaactctgcgatcgcatccatatcagccatatctttcagatcttcataatcccatgtttcgatcttctggatctcatgagatgtacggaaaccgtcaaagaagttgatgaacggaacttttcctttgatagctgcaagatgagctaccggtgtaaggtccataacctcctgtacagaagactcgcaaagcattgcgcagcctgtctgacggcatgccataacgtcagaatgatctccgaaaatggaaagtgcgtgagaagcaagtgcacgggcagatacgttgataacgcccggaagctgctctcctgcgatcttgtaaaggttcgggatcatcagaagaagaccctgagatgctgtgtaggtagttgtaagggcaccggctgccagagatccgtgaactgcacctgcagcaccagcctcggactgcatttcagtaacctgtacttcctgtccaaagatgttctttcttccctgggttgcccactcgtctgtagcttcagccataacagatgaaggggtgatcgggtaaatagcagctacatcagaaaaagcgtatgatgcatgagcggctgcatgattaccatccatggttttcatctttcttgccatagttttcttttcctccttaaaggtatgatgaaaattatttctagactgttatccagtctaaaattccatttctgattatatcatattcctgtgatattgtccaaccggattctggatttttttgcatacaacaaaggagcggctcctgtccgcgcccttcacagcagcctgggcaaaatacattcctgttcaccttcggtgacagcattttgccctttccgtgccataatacgcgcctgaagcagaccgctccctttttatttatcctgactgctcacatcagcagcttcaattgatttcactctgtccgcacagtcacatactgtcgaaaagttcctgaagagttttacgctgaaaaagcttccacagctctttctggatctccacaagctctctgtgaacaaggcagggcgttttatccctgttatctctgacgcagtgatactggggatccatacattctatgatcataagttccggatcaatggctgtataaatatcaaacagcgtgatctcccccggcgtccggttcatggaataacctccatggactcctctgtagcctctgacgagctttgctttctgaagttttttcaggattttgtaagcaaaaggcgctgtaatctcctcacgctcacagatttctccgacactgagccgctccgcacctgaaagtgcgcggatcactcgtactgcataatcacattctcttgtaatcaacatatcttttccctctctactgtctcttatgtccgtcgctgctgtcactgatcaaagcctgcagtttttctgaatatttccttggcagcttactaccgggatgctatgttcccaattatagcaatttgtttgtaaaaattcaacaatttttaaaaataccctgtattagatgcaataataatctgctatttttctgcaaagatcaacagaataccaaaagccaggatcacaacgcccagtattcttctgagccatactcccgcggcggcatatctgggattttttattgcccggtccacataactgtagccgatccccgttcctaccagaagcacactgtgacccaccgcataaagcaccataagcaaaacgccccaccaggcattctgccccagctccgcaacaagcgccagcagggcaaccattaccgggatcgcacagtgggaagcaaacacgccgcccagagctcctgtaaaaaatgcgccgatgtaaccttttttcgtcatgtgctctgatatgtggatatggggaatcagactgatgacgccaaatacctgaagagccatcagtatcataagaattcccataagaattgtccaccagtgccctgcctcatgcatccgatgtccgataaaggatgccactgagccaaaaataccaaaagtcactgccattcccgaggccatggaaagcgacaggcagactgcttttttgcggtctgcttccacagcccccacacaggccagcagcatgggtaccgaggcaagagagcagggggtaaaagaggtaaggatccctgccacaagactcagcacaggcgctgcccagagattttgtgtcatcatctctgtaagcgtatttatgatttcagtcataaacaacaatctcccttctatagaaatacagccatattttctgttcatttccttttaaaagttgattatagcagtgtcctgttgatttttcaagaaaataactcttgcaaaatccagactttacggtacaatgggaatgagctgcaaaaacagcatcctgataaaatgtaaaaccgaaaccgtaacgaagaaaagaggtactttatgatttcagcaaataacatcactctgagggttggaaaaaaagccctgtttgaagatgtcaacatcaaatttacagaaggaaactgctacggtctcattggcgccaacggcgcaggaaaatctacttttctgaagatcctgtccggacagcttgagcccaccaacggcgacattgtgatcacaccgggacagcgtctttctttcctgcagcaggatcactttaaatacgactcctatcctgttctggatacagttattatgggaaactccagactgtatgagattatgaaggaaaaagaagccatatatgcaaaggaagactttacagatgaagacggcatccgcgccagcgagctggaaggtgaatttgcggaaatgaacggatgggaagcagaatctgacgccgcaacccttctgaacggtctgggcatcgaaacagaattccattattcacagatgtctgaccttacaggaagccagaaagtcaaggttcttctggctcaggcgcttttcggcaacccggacatccttcttctggatgagcctaccaaccacctggatcttcctgctattgagtggctggaagaattcctgatcaactttgacaatacgatcatcgtagtttcccatgaccgttatttccttaataaggtctgcactcacactgccgacattgactacggcaagatccagctttatgcaggaaactatgatttctggtttgaatccagccagcttcttattaaacagatgaaagaagcaaataaaaagaaagaagaaaagatcaaggagctgcaggagtttatctcccgtttcagcgccaacgcctccaagtccaagcaggccacttcacgtaaacgtgctctggaaaaaatccagcttgacgatatgcgtccttcaagccgtaagtatccttatatcgacttccgtccaaaccgtgagatcggaaacgaagtccttatggtggaaaacctttccaaaacaattgacggtgtaaaggtcctggacaacatctcctttaccctcggacacgatgacaaggtagcctttgtaggcgctaacgagcaggctatcaccactttcttccgcattcttatgggagagctggaaccggatgaaggaaattacaagtggggcgtaacaacctcccaggcttatttcccaaaagacagcactcaggaatttgacaatgatctgactatcacagactggctgacccagtattctgagattaaagacgccacctatgtcagaggcttcctgggacgtatgcttttcccgggcgaggacggagtaaaacgcgtcaaggttctttccggtggtgaaaaggtgcgctgtctgctttccaagatgatgatctccggcgcaaatatccttgttctggacgagcctaccaaccatctggatatggaatccattactgctctgaacaacggactgatcaaattcccgggagttattcttttcacctcccatgaccatcagtttgttcagacaacagccaaccgtatcatggagattctccctgacggaaaactcattgacaagatcacaacctacgacgagtatcttgccagtgacgagatggcaaagaaacgtcatgtatttgagatcaatgaggaagacgcttccgacaactaaacactttataacattcatctgtactgcaaaaacggcaggcaccacttacaaagtgatgtctgccgtttttccccgggttacttccagaagactttttaccggaaccttcaaagtcagaccgatacgcccgccgcttatataaatttcctcaaaactttccgctgaggaatcaaacactgtgggatatgcttttttcattcccagggggctgcagccgcctcttacatagcctgtgatcttcaggatatcctttacatggatcatgtccactgttttttctccaactgcctttgccgcagcttttctgtcaacctctttctggatcggtaccacgaacacgtaataccctccgctttttccttccattaccaaagttttaaaggactgctcataaggagcgcccacaagatccgcgctgtggatcccgtctataaattcatcacactcataaggaaatgcctcataggaaatcttttttctttccagcatcctcatagcgtttgtcttagcctcttttgccatttcgtctgtcctttccggcctttctttctgtaattttcttccatggaagaatactttctctgtcttcctcttccatcatttctctgaggatttcctcatcaagctcatcctcgtcaatggggtcgtcataataatcatatctgtctttttctttcagatccgcataaaattctctttcccgccaactgttggaatatccgtccaattcatcagaaaattcctgcggattcttctgttccggctgatctacccggatggtataggtcttttttcttccgggattcatactgtaagatgatcgtccgcaggaatcatcgtacgcataagaatcaaggggcagatcaatctccggatcctttgtccgtcttggacgatacacaatagttttgtccggatccagtccgtactcatccacaatacggcgtttcctgtctttttccccaacctgaatatccaccggagtatgccttctggatgaacttctgttttctgaataatttctccttgccgaagaatctcttttttccgaaacatttcttctttcatttcttttttcagagactgtcggctgtccctttgtatgtttctcaaacacatcttcctgaactctttttcttcttgccggagactcataatacatttcttcttcaatgtccgggtacagatcatattcttcctcccggcggtgttcctttttgccccggctggcagaagcttcatattcttcttcatcctctttatatctgctgcggtttgtcgcaaactggatcagcatacccagaacagcaaaggctgcgctgagccctatcccataaggaaaatctgccagtcccccaatctttgccagagacattcctgccattgcgccgccaagaaggctggttcctacaatgatcacttcttttgcccacttcatggcaagagttcccagtcctgctcctgcaagaagacagataaaaaacatcagagaagttgtcgggtgaagaacataaacggcaattcccaggccaagtcctgctcccagaacaaaaatccccaccttataacttacaaatacaagaacagccagcacaacgcctactccggctccgatcgcaagccgcactgtattatcactgacctccataaaaaacgaggctccatatccaagtgccgctccgataacaaaagcaaaaagcatcatccagaaacggagaagcctgtaccccaaaatacaatttatcacaccaaataccagcaggattccaaatcctatcagctgtatgtctgttactgctgaagctgaccggaaccgttctatcatatccattcccctcagcaggatatccagaatgctgttcatactcttttttcctcctttatgttatgtgtcagaacataaaatacatggttttcatattttccagaagtccgtaatgatactccacagactccagcccataaagctgaagataatactctgccacacgatcaatataactctcctgtatccattctctgtaagcttcattatacgcttcctgagtgctgaatttgaatctcaccacagccgcgccattgtccagacgcattttacaatagctgtaaagagcttctgtatcataggtgtcaaaacagccctgattcagcacataaaaatttttgtccactgctgtacattccggtacgggaaattcttctgatgccgtataaatctcccggtactcatcaggaaacggacagagataatcatacagagttgttttgtgctccacaaactgaaccgcatccccttccagaaattccggctgatctccatttgtggcatccacataataatactgtccgtcaagcagcacaatattccatgcatgtccctccgtgctgccctttgtgcttccctccacataaatgcaggggatccccagtctttccagaaaatactggactgatcttgcatacccggcgcacactgcctgctttttccagaaaactcctgccagattctggtcatgatcagatgagacatactccgtcgtatcgatcagatatgtataaactgttttgaccttttcataatcatctgcattttccggtatcattgcagtcatttcctgatatccctgctccatggcagcctgaatctcctgaacttcctggtccgtataagtatatccgggcgaaaacaggctgtaatcctctcccggatacgtggtccggtaaacagcctccctgttgtggatccaaaaaagctccggatgatccttcagaacagcatggtatgctctgtcgatcacctcatcctccgaagaagtcagataaaattcttcttttctctcccggataccctggagcatctgtctgtaaataactttttcctgatctctcagaagctgaaaatagtattcctgatgaccttcctctgtctgcgcagtctcctgctcccgaagtttttttacctgttccggttcctgatcaaacacggctctggctgcatctgccatctgttccagccctgttttttccttctgatcacctacggttctctctttctgcgatatcccgaatataaggccggcaacgatcagaagcagaaatagcagaaaaaggagcttgggaaaacgcctttttttcatttgtttctccttttgaaaaatcatgcccatgcggctttcatttttccgcatgggcatatgttacgctgcgtgtaaacagtaactgactgatttctctgtcagctcttccgtgtcagtcttcaaaaataacctctatatcctcaaattcctctgcctttgaggtactctgagtaactgaaatattctggtcaaggattccctgaagcgtatctgtcacctcaacattgcctgtttcccgatcttcttcggacactacagtctgctcatcctcttccatatcctcaaaaatcacttctacatcttcatcagagacaaagatttcgtcgctgctgccgctatttaacacagcatcagaagcgctgcctgaagtaagatcttctgctgttccattctgttccagtttttcaggagctgaaacgtttgctgcagaagctccgtcactgagcatctgagtccgttcttcctctgtaggataaaaatccggctgacggatatatcggaagcttgcaccgtaagcctctcctactgtaacgccgtttttgctggaagaacaatgtactgcgatccagtctcctgcatctgtctgaccgcagataatacccacatggttgtcgcttcccgcctccggtccgctctggaataccagatctccaggctgagcgtcttcttcactgaccacattggcattgagccattgctcagaagttccgtctcctacgctgctctgcattccctggttcagatatccattgatcacagaccaggtaacaaatccgctgcagtccagtccgtaggctcttgtacttcctgtacttggacttcctgccgcatctaccttttctgcatttccccagttcgcatccttaccgatggctgtggatttgccgccccagaaatatcccacctctccaaccagagaatatgctgctgtgatcacatttacacgttcctctgaaacatcgtcaccgacactctggcgcacaaagccttttgcgtccgttacaactgcacagagaagcttgcagtctgtttccacatattttttaaggatatctctctgatcctgaggaatcttgtttttctttatgtaagtattaatatgataatttccataggaaacatgagaaggattctcttcatctctcacgatcggattcatttctgcaaaaatttccgccagtttgttttttgaagaggaatccatttgaaactccttaacgccgctctgactctcttcataaacataaacagcaagaatatcctgccagtttctcaccagaagggaatccgaagaagccgtctgaccgttttcacgggtatcactggcatctgtcaggccattcttttctttatattccctttcaatctgatccatcacagaagcgaaatcctctgaaaaagtaagctgataattatttttcagactgtccagataaaactctcttcctgcatgaagattggataccatacttgtgtaatataccggagtacctgtctttcctgtttcagaaccatctgaaaaatccgtcttatcatcatccttgccttcctgttttttaagaacttccattctcttttccatttttacaagaatatcgtaatttgtcacaagcttcttttcttcttctgtaaaatcatcataaatctcacgaagctctttcagctttttttcatgctttaatgtaagcttttcctttgaaagtttatcaatctcagcaatcagagcttttactgcctgttcatccggttccggtgttaccgttggctgcggtgttacggtaacgctcggctgaggcgttacggttggttccggccccggtgttactgtcggtgaaggctgcggtgtcactgtcggatctggttccggtgttaccgttggttccggttccggcgtcacggttggctgcggtgcttctgtaggcttcggagcctctgtcggcgcaggcgttgcaggtgcctctgtcggtaccggagctactgtaggcgcaggtgtggcaggtgcttccgtaggcgcaggagctgtttctccctgtcctgaaccgtctccgaaatccgctgcagcctctgtcccttcactgcctgccattacagccgccggacttgacagaactgtaccggaaatcaatgtaatacataaatattttgtcagatatttgttcttcattctggttaatattactcccttccaagaacatatctttattcccctatataaaggtatgccttcctcaatgtcgtttgcttacatatgaccgtttttattttatcatacacttttttcaaaatcaaccgccggagcacaggccccggcggttttagtacaaaattcatatttttttcatattttttatatttcagaaaacacatacaggaactttttccggctccagtcccggacacagccggcacactccccggaacacctgacagcacacatcaagaatatacctgatatcatctgaaatattccgttcttttttcagatattccgcatgtttttcccgaatatactctgtaagctgtccaaagctcccaaagctgatctcagccgcctgataccgtgccgcttcgccatttcttatacaggtcttcaaccggtttttcagttctttttcatagctgttatgctctacaagagatccggtaaaggttttattatgaggaaaagtaaagtaatcggcaatgtagtgaaaaatctccccaagcctgcgccagaacactctttctctgtactgatccacgccatcctctaccagggtcttcagtttttcctgtatttcatcaaaggttccaaaaaactcatgtctttttgttacaaaagacggtctgatatccggaagaatgtttcccaggcaaaatgcctttctgtgtgactgaagactctcagaaaccgtcatctgatcagccagatatctggccagcagtatatgtgattttttcctcaatttcgtattctctctttcataaaaaacagtttactgcaaccactgttcactataacagaaaatctcagcttttacaaataaagtttttataaaatctgtaaactgttttttatttgcatatccagagcttttgatatacattcgccaaaactgccggggaaacagctctgtttcctcccggcagttcttcaaaatatcacggattacagttctgacagggagaatagccctgttgtaccagctcatcccttgttcccgtcatctccattttgtttttttctttcatctgatttacactgtgacagtccggacggtgaaatttgcctgtattcacattaaggatataagtagcctcagctgcgcttttatctgtgaaagtctcctgttctgaagatgaaaatgtttcttctgttcccgcgctgagttccggactttcctgcgcagaaaagtcctctgtttcctcccagctgtctccggtactgtaatcaatccccactccctgctggacattatagcaatatacattaaaaagaactccctgaccgccgtcctctacagactgtgcttccatctgaacgcctgatgccaccagatcatcgccgttatataagggagtcactctgtaaagcacatggttcccggtttcgcggatataatctgcagtcatatcctcaaaaggcagcatcccttctacattcatatacctggtcccggtgatcagattttcttcattggcgttttccccggtaagctgatagccgatcaaatgacatctgttatacaaatattttccatctacacaatcgtatttctgagtatgccagccggacgggcgaacctgtccgatctttccccgttcctctgtgggcatcagctcctgtcctatatttgcaaaagcagctccgcatcttcccagtgaatccagttcactgtagctttcaaaagattcaagagcaagatcttcttctgtaaattccggaacattgtcattgagtactgtataggcgcttcctgtataagaaggaacagaagccagatccaccgctccataaaccgtttccggcatccacaggttccctgccgcgtttcctgtcagcagacccacagacagtatgacggaagccagaattttctttaagtttttcattatacccgctcctttatgtaagattttacagtttttgccattttgcggcaaaatctctgcaaaaatcctatcacagaagcagatattttgcaatgcattggttccataaccgcaaaaaggggtacggaaaatttccgtaccctgctttttactctaatagactactgaacacgtatcctgtctggccttcataatcaatctgaatccagtcgccttcctggcctgttttttcaacctgagttccctcgtccagaccaccgataatctctgattcatcactggcttccgctctgacattacagccttctgtaactgtcatagtactgccgctctgtgaatctgcagctgccgcatcctctcccagtccgttcaggaattctgcaagactgctgtctttctgctgtgccgcatcatattctgcctgtacctctgctctcagcttctgtacatcctcattattcaaaaggtcttccatataagaagaaacttttgtattctgatctgccgcgcccagaattttatacttcccgtcactgtcctttacaacataggcataccccagcgaaggtaccggtgtgtcaattccactgcagatataactgtaacaggtatatactacataagaattatcgtccaacccctttttcgtatagacactgcccggttcataagcttcaatataatccttggcattcgtaatcctgctctcatctgctgaagtcagatcactgaccagagtttttaacgttgcaatatctctttcccctaaagccttgtagtagctctgcataaatgcagtaatgtctgcatcgcctttttccaagggattcatgtcttcttctttatttccgtcgtttgtctccccatcatcttccggagaagaaggatcatttccctggctgttgtcctgagctgttttctgttctttatcagaagcacccttcccgcttccaacacaggcacgtacaccaaagaacaaaacagctacgattaccagaatagcgccgccaagcataaaatagcggaggttatctgataaccattccctgaaattatccaagttcttgtcctccttaaattacaacgcgccggaacatccccagttccgcgcaaatacacctgaagggaatcgaacccccgcacatggtaccggaaaccactgctctatccactgagctacaggtgctttttactgtctgaaccctttttgcgctctgtattttctataaaaatgcttatttttacgcatttaccagatatactcagaacgacccctatattgtcttatgtgtatttaaagtgttaatcagtcgccattagccccttactgccatcaccgattataattctataatggggaaactatggggaatattaaatacacatcccattatgacgaggaaagatcattgtcttttcatcactaacatattataagtggttcaacacgatatatatattaccacattattattcaaaagtaaagttttttcttttttctaagcaaatcaggcaatttaatggttactgttcaggaatctcctgaagcaggtatgttcatgcattggcagagctaatcaacactttcaaaaattctgaattccatttttccggctgttaaaattatggctgcagtttccggaaatactatcggcatgaagcacagggaagccagaataagttttctcggatttttgatcatgatttttccgtaaagcgcctcgcagaaattacctgttccggattccccgtatgcatttcccttttattcaaattattttttcaaaggcttcatccggaataacgaagtgcttcaattggtttttttcgtgccgccttattggcaggatagagtccaaatatcactccgatcagcagtgaaaatatcacggagatcccggcaaccttcatgtccatatggaagctcatagaatcttccattacttttccgataattttcagtatcgcaaaggatattccaattcctgccgcacagcccatcatactgactataagagcttccataaggaactgcatcatgattcctcctcttccggctccaattgccttgcgaataccgatttctctggttctttcagtaactgacaccagcataatgttcatgataccgatgcctcctaccagaagagaaatagctgcgattcctccgatcatcagggacatggtatcatccacaccctccatagcactcataatctcagactgattcataatggaaaaagcatcttcatcttcagacagccgctcaagcatgattctttccacggctgcttcagcctgatccatggattcctcatctgcggaggatacataaaactgtgtgatatccagcacattatccgctattctggtaagcgtagaataaggaatatatccttccagtgttacagtttccgactcctcctcagaagaactttctgtcatagactgtgttgaggtaagagaagaattatcgtctgaaagaacacctgcaaccaaaaagctttttccatccagagacagggtttctcccgctgcgtcttcccttccaaaaaattctatcgctgtatccgcactgatgatcactaccagagaattattatccagatccgtctgcttcagggttcttcctgaagaaagctccagtttcataatatcaaaatagcttcctgtcgttccggtgatactcatggttccgcttgtatatccgctttttgcagtaacagaggttctaccatatggcgcggccgcttccaacgcctcatcatccataagctcttgaaattcatttaaccgtatgggattttccttgtcatctgtaacccttaccgtcagataactggatcccatatccgagatctgttctgatacagatgaggatgccccgtctgcaatagaaaccaggacgatcaatgccgaaacaccgataataatccccagcatggtaagaaaggtacgtagtttattggcacatactgctgcccaggacatcttacaggtctgccatatcatgctgtcacctcatccacatgtccgtcacggatccgtatcattctctcagcctcctgggccaccccattatcgtgagtgatcagcacaatggtatttccgacttcgtgaagctcatggaacaggcacatgatttcctgtccggtccggctgtccagatttcccgtaggttcgtctgcaagaaacagagaaggcttcgtcaccagcgctcttgcaatggcaactctttgctgctggcctccggaaagctctgtaggacggtggtgcattctatgagacagctctaccttttccagagctttacggactctctcctttctttctgctgctttgactccctggtacaaaagaggcagttcaacattttcctctgcagtaagcctgggcaggagattaaaattctgaaagataaaccccagcttatgattgcgtatcctggccagctcccgttccgaatactgctcaatggaaatcccgtccagaatatattccccctcgtctgccacatccagacagccgataatattcatcattgtggattttccgcttccggagggaccgatgatactgacaaattctccctcctggatgctcatgctggcatgatccagagcgtataccgtttcatctccaatggtatatatttttgaaatctctttcagttctatcaatgtactttcacctactttcccgacggatttcccattccgccgcccatatctccgcctccgggcatatttcccatattaccgcctccggacatatttcccatatctccgcccggcatatctcccatatctccgcccggcatgctgaagcctgtatcagaagaggtatttccgccgccagtcttctggtaataaaccacatcgccttcggaaagcccctctgtgatctctacgttttctccatcggaaagccccgtggttacctgctgttcaccggaaagatttccttcgtcatcctgctctgtataaacaaaaacttcctctccccgttcctgcagggcattaaccggaatggttacaatattttctttttcctcgattgtaatcgttgcggatgcgttcattcctgctttcatttcttcatcttttggaatggtgatctccactgtatacttggccacaccgccgcttgcagaagccgtatttcctacctttgtcacagtcccttcaaatgttttatcctctatggcatcaaaagtcacctgcgccgtctgtccctgttctacggaattgatgtccagctcatctacgcttaccgaaagcagcatagaagtatcgccggaaatcgtaaaggctgtagtgtctgtgctgtactgggaggctgtatctgtctgggtttcctcttcccctgactgctggccatctgaggtctgtgttccggaactggttcctccggcagcatttacacttccggttattccggaggatgtactccctgccccctgagaactgcctgtattctgtgtcgttcccgtattattattctgagtttctggcgacacctgactttctccgtctgtaattccattttcctcgcccgtctgtgtatctgatcccgaattttccgtattgttctgggcgtcttcagaaggagcagagccgccttgatttccttccgtgcttccggaatcacctgaggtatccccaggctcctctgtacttccctctgtttccggaaaagtaatggtaaagctcagcgtgcttccatcagcggaaagtgatactccggacagcactccggataccgcctgagtcacactgtcggctgcaaactgatagccctcccctgcataaagcataactgctgcctgataggttgctgccggctggaaggtactgtctcccggattccaggatatagttcctgtatagctgttgtctgaggaaacaatctgcgtctgaggactgcctcctgttcttggaacaacaatccccagcgtctgcgcgtttcccgccgatgtgtctgccatgctcagataaagagtctgcttctctggctgagaaggtgtttcttccatacttcctgtatcatcagaaaatatttctgctgtttcatctgtatcggacacattaacgatacgaacaacggattcatttgtgtaatacatgtttgatgcctgaactccatagcttttcgtataggacatatttagcgcctggatgccagtcccttttgtataagacatatttgacagctgaactccgctgccggctgatactgatgaggaatcagaagtttcctcatcagaaacataaatctcttcgatagtaccatccatatctgcagtaatggttcctttttttgcaagattcagaagctctgtcaaagtctctgccagtgcctctctctgtccgtaaagtgcttcataacttgctgtgatactgtcttcgtccagcgtcagaagcgtgtctccgctgtctaccgcctcatcctcagatacatttacctctgctaaattccattagagaacatatcagagaaacgcccccatatctaaagatacaagagcgttatcaaactgttaggggcagagatattttttcatctgcacctttatcttttctctggcaagaacgacagaccgcctaaccgcctgtgccgtgcaatgctccattgcagcaatatcatagtaattgaaatcgtactcgtaatagagcaggaaacgccgcctttgtatctctggcagagcggcaatgatacggtggagcagttcggagcgttcctgctcgataatcagctcgtcaacgcctttcggcgtaacccttgcccttttgttaagggcttcatcggaaagctcgaaaaattctttgtggcgttcatccgattgcagcagattacggtttctgcgttccatctgccgaaactcagtaaagaattgttcggatacctctaattcgtgatagccgccttgcccgtccttaaagctgataaaataccttgtgccgttttccgccgcttcctcccgaagcgtatatgttttaactcggtatgccattatgtttttcctcctgcgaaaaaatagggcgaaaggtttttgacctctcaccccatagcccgcaggtgaatgtatttttcttcccttaccgcttaaaggctttcagctttttccgcaggtgtcccatccttgcgtagacagcccccgttgtcagaccgacaatcggggcaatctcctttgtggaatagccctgcatttttaggagagcgattttcagagtgcgcctgtctaccgtgactaatgcgaggtacagattttcattttcaatctcgtccagtaaatcagccaccgtcctaacctccgtttgtttctccctgtccgccattccctcaaggtattccccgacatcattcagatagcggtagaaccgtctggcggcattaaaatccgccctgtcgtaaatacggattttctcaatggtatcctcgtcaacaccacatttccgtaaaatcctttcctccgcttctttccagatacgccatttgcgctcctcccgtccgtggttatatgccatttcttttcctccaatcgggatttcataaatccaagattgagagggcagtaagaaatccccctcgattttccaaaggaaaaatcaaaggggctttgcacttaaaatctgctttccattatttttctgagctttgccagaattttgagcttgtgtctgtttaccgtactctggtcaacattttccatctttgcaatctctttagtggaaacaccgtcaaagaagattgcccgtatcaacgcccgctcatcatccgacagcaagagcagggcggcgttcagcctgtccaacatcatggaatggataactgtttcctcaacgcccgccgtttcatcggcaataaagtccagagcgttgccctcgctatcgacaaatccatctaatgaaagcaggctgttcttcgcatccagtttctgaagataacgccaccgctctttatcccgatagaagtccgtgtactgttcccgcacaacctcaatcagacagccctgcacagggataaaaagcttgtccgaatatgtacggtctgcttctctgcggcggcaaaaatccatataggacaactccgcatagctgccattctctttgatatatacctttctcggtgcgtatttcaccgtagacacctccaatctgaattttgaaaatcgttaaaatccagattgaaaggcggggaacggcagcctacgccagaaaccgctttacggcgcatttctgcaaaaagtgacaaaagaaaaaccgcaaaggctgtcaccatataaggaagtaatttgaaaacattattggaatacaacttatgggggatagcaaaggcaaaagccagcgtaagaagcagaaacgcttcttgcactggctttctttaatgtcaacaataaaatcgcacattcgcaaagggagaaatcctttgccatactttaggggaaagagatcgggaaatatgcgatgtcaaaaatactacatagtgattgacgaaaaagaacggagaattatttccaacgctctcaaaatcagaatgacggagggttacttatggaaaaaacaatatttgaacagatgggcggcacttattcaaaagttggcgattataatctgccaaatcttatactgccacaagaagccaagctaatcggcttatgaggacagcggcacgcaaagtatttggaacaacgccataaggttttgcatatgaacctactaacaggtggaaagctgaacgactaccttgacgatattgacaagcgagcagataaaatgttttctcggctggtaacggaatattccgacaggcagggtgtgacagaacaattgaaaaccgaaaatcaattcttatggcttcaaaagatgaataacattctggcgtatgtaagagaaattgttgaaaatgagataatttattcataggtgaatgatagcgtttccgcaataagcgacaatgccattcaaacttaagcaagacagtttgtgaattgaaaaatctcatgtttttgtgtaaaataggaaaaaagtcaaactgagaagtcgagatttgaaaggagtaacagacatgaaatttcctttttatgattcacccgatactgctacgattatctgttgccatatattggagcgtcaggcacctattctatatgtatcgcatgatgaagatgacggaatgtggcaatttctatgcggagaaacacatgaaacagatgaagcaaatttagtatctttaaaatgggtttttgacttagataactctgtcaataccttaaaggatatgccttgcggttactatgcagagagaaaaaaccaagatgacgattggattatcagaaagcgataacttgcagtttatcggggagctaaatagaacgaagaatcggtatttggaggttgaccatgatagctattataggagcaggcgtcttttcaatagtgattgtattatcatttcttatagtttgtggttttccattaggagagttgacaatgggagggcgatataaagttttccctaagaaactaaggattgttttggtaatgcagattattatacagatattttttgtggtcataatattgcaaatgggagggcttataccattttggttttcagagaacgcaacaaagataatctgtatcatcatggcagcatatctctcattcaatacaattatgaattttatatccaaaagcaaaaaagaaaagtatatcatgacaccgctttctgcaatttcagcagtatgtttttggataatcacactgtaaaaaatataaaaaccctcatttgtaaaggagattaccatgtcagtcaatatagcagaaacatttgaattactgtttaataagaataataatgttgcatacaaggcgttgcagacattgcaaaaacaaagcgaagaaactgattgtgtctatccctatatggatagattaagcgatatgcttgacagcgataattcgtatattcgcacaaggggacttacattacttgcttataatgcgaaatgggataaagattataagattgatgaggttattgataagtatttgaaacatataacagatgtcaaacctattacagcaagacaatgtattaaattgttacccattattgcaaaacataagcctgaattgaagagtgatattctttccaaacttcataaagcagatatttctatttatgaggatagtatgcagtcattagtttataaggatattcaaaaatcactaaaggttatacagaaatcataaaaaaacacatttctattttgccaaaaaaaggaatactaagcatattaggaaagacttaaatcgaaataagttgattaacaaagcgagaaatcgggattttccgacacaacaataagtcaaaaaggatatggatatgaaaaacacgaaaccgaaatctaagaagaaaaagattctctttattatattatctattgtggtcacactaataattgctggcgattggatattgactgtaatggtatataacgagaattttaaccagcgatttgagagctatgagccgcttatgctctacgttgatgactttgacggattgcaccgcacgaaatatgagtttagttccaacggggggcagaaactggcgggatatatgtatagttcgggagaaaaccagcgtggtatcgttgtaatggcacatggctttggtggaggtggacataattcttatatggattgcgtgaattattttgcctgtcatggatattatgttttctcctatgacgctacgggaaatgatgaaagcgagggtgagggagtcggagggcttccacagggagtaattgaccttgactatgcaattacatttgtggaggaaagcgggaaattcccaagtctgccaatcgttttattcgggcatagctggggcggctacagtgtttgcagtgtgcttacataccaccccgaagtaaaagccgttatagcgtgttcgggttttaacgcttcaccgaatctgtttgaagccgaggggaaaaaacaggtaggaaatggtatttatttgatgttaccatttgtgaaactgcatgagaggattcaatatggcggttatgcctcaaatactgcgttggacggcttctcaaaaagcaatgccgctgttatgattgtgcatagctttgatgatgaagttgttccagccgaatacggctacgaaatttattacgaaaaatacaaggacgattcccgatttagctttattcctcttgagaataaaggacataactatttcaatgacgacacatatcgcaatgagtttaatgcgaaatttgatgaatggctcaaaacgcttgactatgactataacacagaggaaaacagggaacggttttcggaggataaagctaattatatatatcaaaaccttgacagggaaaaatggtgtaattcattggatttggagttgttcgaggattttgttgggttttatgatgaacatatacattaaccaaattcataatttgtcgggaagccaagtataaaaggaaaacgaaatttcataaggtgaggataatggttagagaagtaaaatggacaaaatatttatggctgagcctgctctcatttgcagcatttatgcttgaatatctgtcaatattcggaattgaagttatatttctacatgtagatatacagaattatacaatgcagcaaagaagtattcattgtatgataatggtttttatgtgggcgttcttcattagtgttctcctgcttttttctataaaacattatcattttccagtaaaaggaaacaaaagagacataatttctttggaaaattggatagtgacgcttgcctgttttattggctgcaaaattatgactttcattgattggcatacattaaagattattggagaagcacagggtaaaaccgtatttcaattttgtatgcaatatttatactatatatttgaagtaatgcttgtttttctaatcataatatacgggcaaaaagcgattgaaaccctgttgaaaaaagaaagcccaattccttttggcggtattatattggctatgacatggggagtgtttcattttgtatcaagaggagtaggacttgaaatatggaacggaatttccactatgatattttctgctctcagtggtgtaatgtatttaagattaaacaggaaatacttatattgctatcttttcatcgctataggttatttgctataatttcccatttatcgggtggacaacatctcatcaaaaagccagacacataatgcgcagagtcaacaggcttgtgagcaatcacagcctgtcggctctgctcttttgtccaaataaaaacgaacatgatttttatttgaaattaaatagtatgcccactttccgaaaaaaatattcaaaaaatttttggaaagtattgacaaacatgcatattccgcaagaactgcgcatccgttccagaggaacggagcgccattccgcttcaaactgagcaaagctcagcaggttgattaattactattggttattctgcaatccctgccaggaaattcaaggcgatatgccttagatgtcattcgacttaagcaggcatctgcgtaggtggaatccccaaaaagctgataccatccggatactggaatctgtgagataataatagttgccttgcggcagtctctggactcgatgatttcaaataaatcgcggcatttctcgatgtccagatccattaagccgaaatcatctatcaccatgagatcataagcggccatttcattcgaatactcaaagtaagtaccttcctgcctggcatgatctgattcctttaagagtgtgttcgcacgtatgtatttaacagtacggttctgatgcattgctgtgatacataaggcgcaggcgatgtgcgttttcccagcaccggcccctccggtcatcagcaggttattcggctcatcgatccaatcacacttggccagaagttctatgacgtgtgtattcagctgacgttctggatcatagattgaactgtcaagatcagctgcaggatatttcagggtcgctttcttcatgagacgtttaaactttttactctcacgctgatcccactcctgatttacaatagcagcaaagcggacttcaaatggttcgagacctgtgtttggttccagcagctgcttttcaaatgcttcagccataccggacatgcgaagtttatacagccgatccatgagtatgttctgttcctttgtgagtttatcgttataaagatagtcttttaatctgtatgccatagtacgtcacccttacttatagtagtcctttcctctgatattttcatgattgggcagtgttcctggtgaatgctcggggagttccttcacatccatctttttcagcatctgcttgaaggtaaaatacttacaggaattgatctctatacatttacgggcaacttcttcagcagcacctttcgggattgtttttactttatgcaggatacctgcacaggcattataagactgctcttcatgttttgatgatttaaggagtctgtcaatcagttctgacatcgcaggaccaatggcagaagcccagcggcggtaataattaccatcctttgaattgacttctttgtaataaaggtgttctggcggcatatgttcatctaccgtgatatacagcggaaactctctataagaccgcttatgtgtacagatcagccgattatactgatcacagattctgatctctgaagcggttgccttcaggattgcaggcttgccacagtaagagtacaatacggagtagtagtggccgtcatactcgatgtggtagttgttgggaatttttaggaccgctttatagtcgcaagccgtgtaacatccgcctggcagtggtttcatacatggtttgtcatacttttcgaaagcatcctgtcttgagaaatccttgccttgaaaagatcgtttattgaggactgctactatttttttgatttcagcattcaggtcttcaaatgatatatatatcttttctttcagtttctcaaccaggtgtatttcaagataacgtacatgattttcaactgtaggcttgcctttcggctttctagcgggtggtggaagaactatagtttcatagaaatcttccagatctgcaaatgtagactgcaggataagttcatcctttgtgtgcttggttacagcagttcgcaggttatcgggcacaaagtatttcgtaacagcaccataaaatgaaacagcatgggcacagccttctataaaacatgggagcttctcatttggaaaagcttctgcatagatcaggctgctgactccaagcgtggtcgcaaagatatggacttttttgatctcgcccgtttcggtatctgttaacagttccggctgatcaccgacccagtcgatatacatcttttcacccgggattcggtttacggccattgataccttctggccaccatagttttctgctatgaatcggttgaagtattcgtaaaactgtgacttctcataaccatcaggattcttttctttataatccagccaacagaacgaaatgttcatgcggctccctggtgcatggattctgtcatagtaatactggaaatctggaagtgggacatctttcctctgtagatttttctgcggatagaaaaggttctccactttcttaggtgccatcattcggagttcctcgattgggattccgttggcatggtatcggctcatgatcagatttaatgtacctgagccaatcttgtaacggtccataacggacctggtctggcatccattcaaacgcatctggatggagccgataatcgtgttgtagtcttgcatagttatgcctcctttcgcaatcatttgatgactacgaaagaactataacacgttgaaaacttattgatcagctgaagcggaaacgcgttcagttacatccggaaagactgatcagttcttagcggaatgcgtggtcagatgagccggaatttgcaacaaacacttatttcattcagtataataaaatactcttttaggagaatcacaaccaattacatatcttcacagaatttaataggacggctttacgccgtacacgcctgcggtatgcgaaaagtaaatgccgccgcttctgaaactgctttgaactgtcggcaacagataagcgtaacagacagtttcgactttgaatctcaaagccggttacatcattgtgaaaccaaaaccgcaagggataagtctatccttttgtattggtcggtacacattgatgtgccggcttttttgctgcccaaatgccggttacaactgaatgaccggctggatgggatatgattttgcgataacctcttttttcggagagtaagcgaaacaacgccacctaagatggggcagggacagaaaaacgacattcagacagaccggcggaaaacaagagaccgtatgcggcagaaagagtgtcgcataccgtagcaagcagggaaactgtattgacagtttccactccaaccggctttaagagccgattgttctttagggacaccctaaaacccatttacaaaatcaaagaaaggactgatgttatgaacgaagccaagaataaaaatctgtttatccgagtgagcgaaaaagagaaaactatcattgagcgcaatgccaaaaagtgcgggctttccgtgtcagagtatctccgccagcgtgctttggggtatatgccgagagccgtcctgcccgaagcattttcctcttttaacgataagctagatgaactctgcgtcgctgtcgaaggcaaaattacagcggacacggaagaaaaaataattgccttgattgatggaatcacagccgagttaatcctccctcaaaaagaaaaggcggtggtataaatggcaactaccggcttctggcctgtcaaagacaggctgaaggaagtgattgactatgcggagaatcccgacaaaaccattgataaaaagtatatggacagcgatttatatgccgctctgcggtatgtttccaatgacaaaaagaccgatgagcgtatgtatgtcagcggcatcaactgcaacgcaaagcgggcatatgagcgtatgacggcaacaaaaaaacgcttcgggaaaatgggcggaaatgtagcgtaccacggctaccagagcttccagaccggcgaagccacgcccgaagaagcgcacaaaatcgggctggaaaccgcaaggcggatgtggggaaacgagtatgaagttgttgttaccacacaccttaacacagataatgtccataatcattttgttgtaaattccgtctcctttaagacgagcaggaaatttgaaaaccatatctccgaccactaccgcctgcgggaaatctccgacgccgtatgtctggaacatggaaagggcattctcaaagacgcagagttttatggcaaaagcaaaaaagaatactggcggaaacaaaacggcgggctgtcgcatcgggagattttgaaagcagatattgacgccgcccttgcccagtccgccaatttcaaagcctttgaaatccgtttaaaggatatgggctatgaaatctgccgtgatgaaaacttcgcccattattctgtaaaagggacaggctggcagagggcagtccgcttagaccggcttggaaaagaatacacgcccgaagcaatcagggtaaggctgcttgacaaccagcggcatatcggctatgtcccattccacaagccaaaatatacgccgctccttacgcttgaaatcgagtaccgtaaaatacagcgcatggacggcatacagatacttttcgcccttgtgactgaactttgcaggctggttacgggaaacaatattgcccccgaaactccccgtccgctctcccccgccatgcggcaggaaattgtaaaattagataaaacgctaaaagaatacaagttcttatgtaagaacaacattgattccccgcaggagcttgtttcttttatcgaagaaaagcggaagcaaatcggcgcattggaaaaagaaaggcagtcagtttacaaccgcaaccgccataagaaaagcggggaattgaatgcgcaggcaagggaaatctccgccaagataaaacctctgcgggcggaattgtcccttgcaaaggctgtccttgaaaaaataccgaagctgaaagaagtaattgaagccgaacggcaggcggaaaccgccgttatatccaaaaataaggaaagaaggtatacacgatgacaaatacagaaattaaaaccaagaacccgccgaagaaaaaggcggcgaatatccaagtagataaactccgtacttttgagggacatccttttaaagtactggatgatgaagatatggataagctcgccgagagtataaatgcacaggggattatctcaccgctgattgtcaggacgattgaaagcacagatgaatatgaagtgataagcggacacaggcgtttacacgccgccataaaagcagggctttccgaagtgcctgctttaatttatccccttgaccgaaacgaagcgatgattgcggttgtagacagcaacctgcaccgtgaaaggctgctcccaagtgaaaaagcctttgcctacaaaatgaaaatggatgcaatgaaagcacagggcaggagaacggatttaactttgtcgcaacttgcgacaaagtcggataccgccgccgaaatcggaaaatcgcagaatgagagccgtgaccaagtgttccgctatatccgtctgacttatcttatccccaaactgcttaacaaggttgacgagggcattatcgcactcagccccgctgtggagttgtcctacctctccaaagaacagcagaaaatactgcttgacgcaatgagcctgaacgactgcacaccctcacacgcacagagtatccgcatgaagaaacaggctcagcagaatactctttcctcggatagtatttatgaaatcatgtcagaggaaaaagccaaccagaccgaacgtatcagctttaaagtacaggatttaaagggatttttcccgaaaaactttacgcagaagcagatgacggacacgattctgaagctcctttatgagtacaacagaaaactggaacgaagccgcagaagccgtgaggaaaggtaaggtagcattatgaaaaaattagaaacctttacagtcaacccaaatgcagtctatatgctaccgcctgagccgatagatgaaaatgagaaaatcaatttatcgcaggaaatactgccccatagtcccgatatccgcattgaaagcagaaaactagtgcgtttcagcggtgaaaacgagttttcccttaaaattggcggcacgacctacgaggtcaatacccatttcagcaaaaaaggaaaacaaagcgtattggagcagtttaaagaactgatattgtccgaaaagctggtttaatattgcacattggaaaaagataactgggtatggtaagataatcttgcctttgctatgcccagttgtcggaaaggagcaaaaaatcatgacaacagcaacgaaaataaacgggcagactgaagaaaaaatcacagctttgtattgcaggctgtcggttgacgatgataataaagacgaggaatccaacagtatcaccaatcaaaagcagatactttctgattatgcaaagaagaacggttatgcaaatactatgttttttgtggatgatggaatcagcggcacgaccttccaaagaccgaattttatgcgtatggagcgtatggcggaaaacggtgaaatcggcacgattatcgtcaaagacctttcccgtttcgggcgtgagcaggtggaaatgggcaggcttacacaggtggtgtacccatcgctgggtatccgttttatcgccatacaggagcgtgtggacactttgaccggcgacggcgtggagatgatgcccttccacaatattttcaacgaatggtatgcggcgcagacctctaagaaaatccgtgcggtgtggcagtccaaagcggaacacggcgagcgtatcgcttctatcgtaccctatgggtacaaaaaatcggaagataacccgaaacaatgggtaatcgacgaaccggcggcgcaaaccgtaaggaagatttttgccctgtgccttgcggggaaaggcccgatgcagattgcaagacagcttgaggaggaaaagatactctcccctgccgcctattttgaatccatcagcaggaaacatgcgcagaaagtccccaaaaacccttgcgggtgggaacaggcgaccgttggctatatccttgaaaacaggcagtacaccggctgcgccgtcaatttcaaaagcactaccgtcagttacaaagtccataagagaatccagcacagcgaggaagattaccaaatcatacccgacatgcaggaagccatcatctccgaggaacaatggctgagggtgcaggaacttcgtaaacacaagcgcagaccgacgaaaaccggcaggacgagccttttttcggggctgctctactgctatgactgcaaatcgaaaatgcactttgtagccgccaagagcatgaaacgaaaacaggagcatttccgctgttcccaatataaatccggcagagggaattgcgccatgcactatatccgtgacattgtccttgaacagcttgtgctggaagctgtcagcgacttatccgattttgtacgctgttatgagccggtattcctgtatctgctggcaaagaaaaacaacgccatgcggcagaagaaataccaaaaacttcagcaggctgttgagaacggcacaaagcggatagcggaaatcgacaggctgattgaaaaggtatttgaacagaacgcaggcggcatcctctccgacgaacggtttgcgaaaatgcttcagaactacgaaaaggaacagaaagcattaacgcaggaagtggaagaaaaccgccagaccttgcagaacgccgaacagcgggtaatggatttaaggcttgtcttacgcactttgcgggaaatgaccgacattaaggagcttacccctacgcttgtcaattcgctgattgagcgtatcgaagtccacaacagcgacaaatccagcggtcacagccatgtgaaggtagacatttattttacggcggtgggtatgatagatattcccacggagaaagaaatccttgccacgatggaagaaatacggaacaacccgcaggacttcaaatttgtggcgtaacaaacggatacggtgtaatcccttttatagagttacactgtatcctacataaaaacatccttatctggcgacagcaaaggctgtcacacctttacggtttaaggagaatttatttctattatgtagagattttacttctacttgtagggcaggaagccccatgtggcgacaaggatttttttaacaggttatccgtccatcctcggtagggtatatgtaaatacagatgaaagccgcttgcaggcaaaagaaatccctccaaacttcaaaagcgaagtcggagggtaattcaagcataacaaatcagcccacccgcacatcgtttttttattaggtggacttgtcctgcctgtgtaaaaaggaaagagccgacaaacggtgattgctcactcattcatcggctctgcgtctaaagcgtctggctctttgatgacggttacttgtaaatcctttacttcaatcagagtttcccgtttgcacttcggacagtagagaggaaagtttttcagaatggtatcttctctaattttgtcacgggttttgctgccacagataggacagcgtatccattctgtttgttgtttcataagcactccgatataaatttttcaagcattggattaagttgcttggcattacgcattggaaagtcgtggtttgctccttgtaatatcattgtttgacagtttggattttgagcaagtaatgtaagagaagttttcatatctctgacttccttactcccacaaatcgccaacataggtatcgttactgcttgatattcaggtaactttgataaatctaatgtattggaaaagaatgagtcatacacctgcggagtaatctgttttgaatattctgccatattatcggcttgtttttttgtgtaattccaatatttcccttgaaattgcactaaccatctccaatgtagcatttttgcggataaacctgcaagagaacagtacatccgaattgtattcggcttgggatttacccatgcgcttaaaaatacggcaaagtcaaataattcgggctgcttgctgacaagcattattgcaatctgacctccaagcgaatgaccgattacgccgatccgttttttatgtagggttttaatgagcgcaaagagttcctctacggtcttttctggctcataaatctcagtagccgcctttcctgcacctgctaagtgaggtacaataagatggtatttatcagaaaagcaatactgcctacaaaatgtatcaagcgcacccgccccatgcagaagcatgatagtcggattttccttgcttccatattcatcataatacagcataatttttcctttctttgtgaacagtttcaataataaatttttctatttccttgtttacttgctctggattatctccattggcaaaatgctttgcctgttttataaaatgcaaaggataacctgtttgctttgcccattctttgcaatatgccttaaccttgcctgtgctgtctttctcacccaccaatatcaatatggggaacgaaaaattaacatctttattttctacaataaaatattcatatgcaatccgcatttgctggataatttctgctttagacagcggctttaacatagacaacattttttgataggaatagcggctctctgatactgacaatgccatgctctttcgtaaaagatttgttgtaaagcattttgccataggaacaacctgcttcagccaccacaagtctgattttgagtaatatttaagtcccaatggcgttgtatctaacgccacaaatccttttaccatatcaggatacaaagcagcaaaatgttgacttggatagccgcccatagacatacccactaaaaatgttttttgaatgttctctttctgcaatatgctatgtaatatttctgctgtatcttgataagtgaatttctgatatggtttcgacaatccatgcataggaacatcccataagatgattgtgtaattatctgaaaagtagggtatctgcttttcaaacatagtatggtctgcggttactccatgcgtaaaaacaatacagtctgatacattgtcatttctggcaatccaataatgtacagttccgccttgtgacaaaattgttttatgctgcattttgttcacacctcctgcgtataaacctttttccaaaaatcaattaaaataataatttctttctcaatttcatctggtataatacaatttaaacgatattttttcagcatatatccatcgacagcgtaaaagatttcagcatacattgtttttatatcaatatctttccgaaattttgatatatctattttctcaaacactatcatttcacttgccttgctaacatcattaaagttttcttgaatggacttgtgtatttctggagccgtttcataatatgctcttagcgaaaaagcatataaatgcggataatcacgcataagcgaacactttgataataggcttcttttcagcatttcaaaaaagtcatctgtttccaaagttttgtattctgtaaccgctttccttgtcatctcaatagcgttcatccacaagtacatatataattcctttttgttagtaaaatagtgaaaaagcaatgcttttgaaataccgctctcgtctgcaatttccgacattggggcttttttatagctgttttctgaaaacactttgtaagcagcgtttataatacgccgctgtttttctaatggaagtttgaaaaacttgtcattcatatacattctccttattgaccgcaacggttaatgcaagtatattatatatccgttgaccgtttttgagaagactattgttaaaattaaaaaaatagcaacagagctttaaccctctgccgctatgccgcctatgcgtaaatgatttcagtattcacaatctccatcgcacaagcccgtatgttattcatcctcccgacccattctaaggcgttttcagcctttagctgttccgtgataccctgcgcctgcttcatgccctctatgagccgttcaaggcgttcctgcgcctgcctgtcaatgtcggcaaggtaggaattgagcctgccgcttgtgagaagatttgtgtatgtaaccctgcggtgctgtttcagatagtccaagtgccgccgcccgaataagccaatcggctgttccttttcggcaggtaaggcaatgcaggggataaggtaatccccgctttacatgagttaaagacagtgtttcggggaagtgccataatcggcacattccccatgcctatttaatcaatttttcctacaaaacgataataaatctcaatgtccctcactgtcctaccgttcccgtctttccatgactggtggactacgattttctcaatcagttcattcaagagcggggcggtaagctcgtcaatggcactgtatttctggattaagtcaatccagcgttttgcatcgtccgtttcctctttcgtttcttcaagccttgcagagatggtcttgaccgtttcatcaagctgttgctgctccgtgcggtatttgacggagagcatggaataattttcttcgtcaagaagcccttttaccctgtcctcgtacatcttcgcaaaaaggctgttcagctcctgcctgcgtttctgtgcctttttcagctctttttcggcacgggcattctcggactgccgctgtttctcgctgccttgcagcagccgttccagaatggcgtcctcattctcttttaccgccatcagccagtattgtaaccttccgagaacaaacgcatacaaaatcttgtaaggcgtgtaatggagcgtgcagaagttcctgccatacgccgcatactgggtacagcggtaaaaacgccccttgtcctttgtgtttgccgagccgagcgtccatccgcattccccgcaccttataagccctgcgaatatctgcggctcatcgtctttacggctccgtcgccttgaatttacatgcgtctgcaccaaatcccacaaatcctgcgtgacaatcggctcatgcgtattttccaccacgaaccactcatcctcgctatgcttgatattctttttggatttataggacatctttgtcagcttgtaatggacggtatgcccaaggtatatctggttggcgaggatattgctgacggtctgtatgcaccagcggtattttacttcttcaggcttcccctcaaacatggacgccttatacccgttccgtttataaagccaccatgttgggactggcactttatctttggcgagggcgtggcagattttctttgccccatacccatgtgccgcaagctcaaaaatacgctccacaatccacttcgtttcctcatcaataatgagcctgttcttttccgtcggatgcagcttataccctaaaggcgtgactggggcgatgtattccccatttttaaacttggctttcatcgcattttttaccttgcggctcgtttcctttgcctgccattcgttgacgatattcttgaatggggcgatgtcgttgtcctcccttatcgtgtcaacgccgtcatggattgcgatgtaccttacgcccttgctcggaaaataaagctccgtgtactgccccgtgaggatatagttcctgccaagccttgacaaatcctttgtgacaacgcagttgattttcccgtcctctatgtcctcaatcatgcgtttgaagcttggtctttcaaaatttgtacccgaaaatccatcgtccacatactcgttaacgactaaaaatccctgttcatttgcgtaatccctgagtatttgtttctgcgtggaaatgcttgcgctttccccttccagctcgtcatcacggcttaaacgcatatataacgctgtattgtattgctgctgtttcacttgttttaacctcctgtctttggaaacagcccgccacaatacactgcttgcatgaatctattatagcatggggcaggccgtttttccatcattgcaacaatattcttcttatggttttttcatctcgtaccgcatgacattctccgcaagcgtttccacggtctgttttttcccgctgaaatgctctgtaagatggacaatgtttttgccgcagacaaaagaagtctgcccatccttttctatgaaataccctgttgggattcctttctcttttggctggattcctgacttaattattctgtcaaatagctgttttaccgtaatgattcctccctcctgcggtctgttttaactggctgtttctgttggtttaaccgctggttttcaatcgtatcgtggatttggtctaagcagttgtcgatatgggcagagcgtttttcaatcccgtctgcatatttcagccgtttcctaagctctgttatctgctccgtcacgccctgcttttcggctcggagtgtttctttttcggctggtaaagcacggcgtaccttgttccgcaagtgctggcggtagtcgataagtttattcatttcactctggttttgctccctgtcggcgtgtaagtcggagagtgtagagatgttatgctttgacatataccttacctgtgcggtaatctcgtccagtttccgaagctcctctttcatcagcgggcttgtcggcttgtagtccgtgcctttggggaatatccccaactgatagcaccagtagtaatataacgctaagattcccgtggttttctgatgcggtttccatgcgtttttgtactgctctggcatatggggagagtaggaaatccttgctttgtagtttccatatcgggaagccccacctaaacatgaccgtatgaaatcgggcgtcagctgctcgtcaagcgtgtctaaccttgtgaaatgtttatactgcggcagtttcatcttccaatggctgcccgaaaaatcaacctcatatcccttgtcggtaaggtatttcatcatgtgctgtaaatccctgctcccgttgattgcctcccttaaatcctcccgatagacgttgtatcttgtcggctttccgttcttttcatccagataaagcggtcttgcaggggctttcttgggattttcaatcaccgataatccgtactctcggcataagcggtcggacacttcccgcaactttttctgctccgattttgagtaattgtatttgctcccatccagataggaaacggagttgaaacagaaatggttatgcagatgtcctttgtcaagatgtgtggcaacgattatctggtacttgccgccccacatttcccttgccagtttcaatccgatttcatggcactgttcgggcgttacctcgtctggcttgaagctctggtagccgtgccatgcgatatatccgcctgtcttttggtactgcttctttgtcaaaatcatctgctgtaatgcggtttctttcaaacagttgatagcggaaacatactcgccctcatttgtttttgacggatttttcacataggagaacacgtcaaagaagtcctgcatatcttcattcggcacggtcttttctggattttctatatagtcaatcacgtcttttatgctccctttgacatgccataggctcgttaccgccatatcagaccgccccctgttctgtcaattcttctatgctgaaccgttgtgggagagttgttttctgttgcagttctaagataaaatcctcaatctccttacagatttcagtggcggttggatagtatgggacacactttttgaaagcgtcatgcacttcatagagcttgtttaacagttcccaaaactcggtttttggcttcggctgcggggcgtttcccttgcataactggcgcataaattcggcagcggacagaccgcaagcggcggcgcactgctttaatttttcatgttctccctcgttcaatcggacggtaatcgggacattccgcacgcccttttctgatttttctttgctcattttccttaatcctccagtcttaaattcctttcttcggggtattcaggggctgtcccctgagttagtccatgcctgcaagcggcatggattgggattgtggctgacacaatccgatgctcgctatctctgtggacaatgccacagagcatttttcctgtgcagcggtattcttaacgcctgtcttaccctccgaaaagaaaatcctatgtccctgcacctccgttctggatttgatttctcttgacttttggataaatgaaaaagccgccacaccgcaccacgaatgacaggagtgttttctcctgctcggattcgcaatgctatgtaacggctttgaaattcaaaaccatgctgccatacaccagccgaaaagggcagcataaattcggcagcggtcagccttgtccattggctgacattccgttcttccatctatgtgctatttcattttcaatcttccaattccctcacgggtatttcagaatatcatagcggctgtacccatgtcaagattttgggcaaactttttagtattccctgtggacaggaattttatacatcaattttataatttggcgggggaattttatcccccacccaatagcccgtcaaaaagctgtctttattagttggttataaaatcttccgcaactttttccgcagatggtctaatcgtgcataaatagcccctgttgtcaatccaacaagcggtgcaatttcctttgtggaatagccctgcattttcagcaggatgatttgcagggtacgcctgtccaccgtaagcaatgcccgatacagagtttcgtcctcaatctcatccagtaaatcagcaacggtctttacctcggcattccgctccctgtctgccattccctcaaggtattcgccaaagtcgcttgtccaatggtaaaaccgcctgttggaattgaagtctgccctgtcgtctgtgcggatttgttcaatggtggtttcatcaactccatgctcccgtaatattttttcctcggcttctttccagataagccatttcctgttctcccgtccgttgttgtatgccattcttttttcctccaatctgaaatttttgaaaatgctaaaaaccagattggataggaggcgaacggcagccaacagcagaaacagccctgcggcacattccgataaaaaacgacaaaagaaaaaccgcaaaggctcggtgacctctacggttataggagatacatattctgttaagtggagattatacttctggttgcatggcaagaagtagcgttgcatgggcagggatttttttaactggcttcctgctattccccgatatgctatgtacggataaattctgtgttgcatgagcagatagattaccgcccgaaaaaagaacataaaaaaccctccaaacttcaaaaacaggtctggagagtgtctgttaagttttttagggcatagcaataccgcccaccacacgccgtttttttatatggtgaacatccatgctatgaatgaaatgcaggcaataagcaatagctatccatcttctttttatcctcaacacaaatttgtttttttgcagatagctgttgcttaaattgccacattaattttttatccattgattcaagtttggtaaaattctttatgtatatttttattgtttttcttttttgctgacatgataaaaataaattgcgcggattaatagccctccaaaccagccgattggagcggctatccaaattccattataaccaagctttgtgccagacaaaataatagcgacaggcacttgaagacagcacagggaacatatggaagcaatcatcggcacaaatgattttccataccccaaaagcaatccgtttaatacctgcatggctgcaaagataatataaaaagcaggcacaatcttcagatagctgttgccaatatctaaaacagacgtatccctattgaatattgatataaatacagacggaaacaatacaatgacaacagaaatacacgctgatactgcaatccccataaccaatgcgtatttcccgcctttcaataccctgtctttcctttttgcccctaaattctgggcagtaaaattagtcatagcctgccctaagttcaaggcgggcatttctgcaaaagcatctaccttagatgcggcagtatatgccgccatgcaatccgtgccaaacccattaatcagaaactgcaatgacataaatcccacactcacaaatacttgctgtatcatggcgggcgtacctatcttcaagctcttttttaattctgccttgtcaaactgtaaatgcaatacattaataaacaagctgcgataatgtattttcatatataccatacaaacgataaatgacaaaagctgcgataacacagtcgcaaatgccgcccctgccacacccattccgaatgccttaatgaacaatatatcaagcacaatattcagaagcgctgccactatcagaatatatgtaggtgtttttgaatcccccatcccgcgaagaatatttgtaagcgcgttatatgcaaacgtggggataacgccgataaacataattttaagatatatgtcagccgcttcaagcaaagcggacggcactcggaagacaagcagaatctgataggaaaaacatatgcccaaagcagcaattatcaaactgaggcaaaagcagaaagcaaatcccgtatccataacttttttcgcagattccatgtccttactgccaaaataacgtgaaaccaatatgcttgcccccattgaaatgcccatagaaagggcaatcagcagatagtgtatctgaaaactgaaccctaccgccgccagacattctttccccaaaaaattacctacaataaccgtatccgcaagattatatagttgctggaatagattgccgaccaaaattggcagtgaaaataaaaatattgtctttaactcatgttctctcgttaaatccttcatttcgtaacctctttcctactaaaataaaatttattcctttttgttgcatggtattgtttacacacaatacatacaatatagattatattcttgactttgtatgttttcaatgctaatattgtatgtaagacaattttgagcagggagggaaaaagcttgccagttaattcttttgaaaattacccaatgccatggatacccgataaagaaaaattaaaatcaccaatttatatatctattgcggaacttttggaacaggatatccaaagcggcaaactggctggaaatacaaaactgccgccccaaagggaattagcagactttcttgatttgaacctaagcacaataacccgtgcattcaagatttgtgaaaataaggggctaatctatgccaatatagggcaaggcacatttgtatccccaaatgccgccatcccttttttacataaggcaaataacgggtgcgtagaactgggcataatcagacctttttaccagtataataagattgtcgctgatattgcgcaaaaaaccatacaacgcaatacttcccagtatctttttgaatttgacagcatatcggaatcttacaagcacaaacagaccgccataaaatggctgaaatctttccatatagaaacagagcctgaaaacatcatgctgacggcaggaactcaaaatgccctgacgattgtatttttggctcttttccactctggagataaaatcctaactgattcttacacttattccaattttatcggcttagccagacagttaaatgtccagttgatatcagtagccgcagatgaggatggaatgatacccgacctagtggaaaagcagtgcaggataatggatataaaaggaatcttcctaatgccgtcctgcaataatccgacaggaactgtcatgtcaatggaacgaaaaaggaaaattgccagcctcatacagcaataccatctgattttaatggaagatgacgcttatggatttattgcaaatgatacaggagaaccgattcagacattgataccagataataccatttacctgcacagcctgtcaaaatcactttcagcaggcttaagatgcgcatatatggttatccctgattgcttaagacaaacctttcttgaaacggctaataatgtaaatttgaaaataccgctgcttaacgcagaaattataagcgaattaattgcaagcggcaatgcaggcagaatcatagggcagaaaaaaagacaggcaaaagaacggaacaggatatataaaaaatactttccagacagcatctgcccgaatgaatacagcttcttccaatggctgcccctgcctgcccattataacggttatcagttggaaatgcaggcaacagacaatggcattcatatcttctgttctgaccgttttaccgttggcaaagctgaatccacagctataagaattgcaacctgttcccctgattccttacaacaattggaaacaggactgaaaaccctaaaacatttgctggataagaatcagcaatatatttcacaagctaatttcataatatagttactccatttgaaaggcggcaaagaattatattccctgccgccaattctgattatataaaaataatttctccgttcacaatttccctcgcacaagcccttatattatttattttgcctgtccactctatggcattttcttcctttagccgttccgttatgtcctgtgcctgtttcatgctctctataagcctttcaaagcgttcctgcgcctgcctgtcaatgacggctagataggagttcagtctgccacttgtgagaagattggtgtatgtaaccttgtggtactgtttcagataatcctgatgccgctgtccccatgtgcctatcggctgttcttcttcgttgggtaatattaaatctggaataagatacccattttcttcgtgatatgtgccgcctaactgttcaaatattgacttcatatgcaaaaactccttttctgtatggtttggtttctgcggggcatctgcaagcaatgtgtcagcaggctgtatgtatatactatctttaagttaagtaatccccctgccgctcgtatctgccgcccagttcctcaaaaattgtcttttccatcgtctttctacctccgtatttttaatttgaccgtctttgcatgggcgaacttgataatcaattcgtcaacacagtccgtatacctgccctctgcaatcagcttgtttcggaaatcgtttaggcagaggattatcacccgccgctccgtttcatcaagatacaaatgatacttttccatcgtctttcccctcttttctgcggcgcatctcccagccgcccgtattccttaaaacctttgccttgaagcggcgttcccctatgtaaccgccgaagcggtaacagattttaattgcctgctctgttcctgcttcggtttgtgtgcggtcaaacacctcaatgcgctccaccaagagattgaggttttcggcggtcagttcctgtatccccacatattccgccatcagagccgcccactgcaccgcattagtctggctgtccttgacctcctgcaaggcgttttcaaggctctgtatctgccctaaaagctgttcctgctccgtctggtacttgtcaatcagacgggcaaagttgtcattagagatacgccccgaaagggaatcctcataaagcctgtcgaataacctcgtcacttcgtcatagcgtttcttcgcctgcttcagcctgctttcgttggatttccccctgctcccgtccgcctttgtgttcatctttaccgccagagccaccgctctgtccctgtcctcataggcaaggcgggcatggtactggatatcggcaaggacggcattgtataaatcctcgtagaaaatacggtggtctgagcaggcttttgaattatgggcgtaggtggtgcagatataaatacggtgcctgtccttgccccaataccgcaagcccaatgccttgccgcaggagccgcacttcacaagccccgaaaaaggggatacgaaattatccgtggtatcccgcctgcggctcaaaacctttgcgttcgccccgtcaaaaacctcctgcgacacaagcggctcatgggtgttttccacccgtatctggtctgcttcgggaacatttttataaacccccaccttaaatacaatctctttcttgcacataatcgtgtgtccaagatacaacggatttttaataatattctgtatgaccgtgtgcgaccattcgtatttgttggcgggattttcaaaccgttcggaatagtccttttccccacgagagtacagccaccaagagggggaggggacttgttcctctcggaaagtcttagcgattttgtgcgcccccatgcctgcattagcaagctcaaagatacgcttaacaatccatgccgtttccgtatccacaatcagcctgttatggttgtcgggggctttgcggtagccgatagggttaaaggcagtgcggtaaagccccgcctttgccctcgcccgtatggaagaacggattttccttgaattgtccctgctgtaaaattcgtttatgacattcttcagggcagcaatatcgttgttcttgctggcggtatccacgcagtcgttgacggcgatataccgcacattcttcatcgggaaataaatctccgtgaaatgcccgacctttagatggtcacgccccagacgggataaatcctttgtgattaccacatcaatcttccccgcttcaatgtcatcaagcatacggttgaagtctggacgctcgaaattcaaaccgctgaatccgtcgtccacatagacctccaccaccataaagccgtgttcctttgcatactgcgtgagcattgctttctgcgttttaatgctctcgctgtccccctgcgccatatcgtctttcgacaggcggcagtagagggctgtccttaaaatacccattcagcccgcctccttttctgttgttgtgcttaaattgtattctggttctttcacaatttcaaaggtgcggacagggcatttcccccgccgcacctcgtccacaagcagggaaatgaatatctcccgcatattcccgccgcccgaatagactgcctgcaccgttatcttcgggcgttgtaccgcttttgccataggcatatatcctccctccaaaaaggaaaaggagcgtccgaaaacgctccccatccagataaaagaatcactccgacagcactttttccaatgccgcaaggagcttttccgcttccgcttcggtcagcgtaacgcccttgccgcatttctcacggttgggggagaagctacgtatatcatacttcggctctttcccgttccaagagataaggttgatttcttttgtatagccgctttcgcccgtagacagcacggcgatttcctttacgatttcatactgaatatctttcattttctgcctccgttctgttttttctctgcttgaatactctgcatttaccacccgaaaagagaagattatcggctgtccctgttccgttttctctgcaattcactctccaaaagcttgatgatgatgtcctccatctgcttcggcgttgtgcctttggggaagtattttctcagcttctccatgccgattttcaccgtttctttctggtttcccttttcctcggtcataatcgcaaagatggtatccatatcgagccgcccgctttggcttaactgtttcatccgctgtgcctgtgagagtgagggcgttgcttcctcgctctccatcgtgacaagcaggttttcctgctcatcttttttcagaaaggacagctccgccgcaggcgtgagggcgatttttccatcgtccaccatctgtaaaatcggcggtatcagctccgtaagacggataaacctttgtatctgggtgcggctgttgggggatttctgggcaagctgctccaccgaagtcaacttctgcccaagttggggagaagttaaatccgtgcggaagccctgccgtttcatcgcttccagtttcatcttataggcaaacgcacgctccgatgggaggatattttccctctggatattgctgtccacaagggtgataatcgccctgtcacggtctaagggcaaaacaaaagcagggacggtatctatccctgcaagctcacaggcacggacacgccgctgccccgcaatcacctcatagccgttcccgtcctccatcgggcgggtgatgataggcgttaccatgccgaactccttaatgctctccgcaagctccatcaacatttcatcctccacaacacggaacggattgtcggggaacgggtgcaaatccactatcttcaatacggtaaaatcctgttttttcaatctgtttcctacctttcctttgatttattcctgttcggtttctgtatctccgccaacacttcgggcgggattttggagagcaggcgttccatctgggcgtttgtgcgctgaagctcaaatatctttcggtttgcctgctgtacctttaattcctccgcatacttcccatcccgcatacgctcggcgtaatcggcttcctgcccgattttcgctttcaagctgtcaatatacgcctgctgtttcccgatttcctttgagaatttctccacatcgggaagccacgccgctagaagctccagagccttgtcccgctttttccctgcgttaaaggcgttgatatccgacagggcgttgacgatttccccgtactgcttatccagcctgccgcccagtttaaagagccatgtggggatatgcttccgctttgtctccatcgaggactgcccccgttcaagcccgctccaccgtgcggacatccgctcatggtaggcggtctgccactcggacaaggatttctggttgcctaaaaggacttttgccgacagcttcccatcgggcgtaatcgggcaaaaggaaaggtgcatatggggcgttttctcgtccatatgcaccacagcggagaggatattctgcctgccgacacgctccgaaacaaagtcaagagctgtctggaaatacagtttttgttcttcgggcggtaagctgttcataaattcgggcgaagcggtgataagggtttccaccatcatcacgctgtcacgccgcaccttgcagcctgcctccgctatcatgcggttaatctctttcttgtaggtgtagcggggcggcggtacaaggtgataattctctttagagcgtcccatatcaatatctggattgctcttgtaggcttcttttctgcgttcattgtggcgttcacaagccgccacgccgcccgccttgcgcttctgaaagcgcaggattgcatagggcatttctctcattccttcctttcatttttgtctgtgcagagcgtaagccctgcccgcagggtgacagccgtgacaggtgtgacgggtattttgggatacccctgccgctgtcaccctgcgggagaacaccccgtaaacgcaaggtgcaggcgtgggatttcctcgccctccttcggctcgtaaatccacccctgcggtcagaaaaatcctccgatttttccgactgcgtttacagggtgtaacacactacactttgctccgcaaagtcgtgtgccagccgttccctctggactcccttctggcagggctgcgccctgctttatcctccgctctgcgcttcggataaaagaacggcggtatcaccgtcagccgtgacagcatgggagggcatcccaatatcgctgtcacacctgtcacggctgtcaccgcccatcgtaagcacaatctgcctgccgtaccgctttcggcggtatccatagcaaatgccgttctcgctcagaaaggttgtgcggtactcgttgagccatttcgtgatgaccgtggataaatccccgctttcccccatagcagacagaagctccgttgccgtccccgaccactccgctttgtcccgcataaactccaccagccgaaaaaggacgggcggcacggcttccctcgcaagctccgcctgctccctgcgctccacaagctcccaactgcaatcacggaagcggagcgtcagctcttgatattcgatatccctgcccgtcacaaacagctttgcggtatcgaacgcacggctctccttttccagaacaaaggtagcgtccgcactccccgtcagacctgtcgtgccagacaccttgttgaacacatcgctgtcgttctgcttgcggatatggtggacgaccaccaccgaaagggaatgcctgtcggcaaagtcctttatcagcgatatatcgccgtaatcgttggcgtaggcgttgtctttggaagcggtgcgtatcttttgcagcgtatcaatgacaatgagcctgctgtcgggatatactttcagatagtcctcaagctgtaccatcagaccgtccgagagcttgcagctcgccacggcgaaatggagcttcctgtttgcttcatcggtcagacggaataatctgtcctgtatgcggaaaaaggtatcctccagacagaggtacagcacatcgccctcctttgtcggcatgtcccacaggggaagcccctgcgacacgcaaaggcagagcttgagcatgagccagctcttaccgattttctgtgagccgcagaacagcgacaagcccgtggggataagaccgtccaccacaaaggacggcttttcaagcggctcataaaggagcgtttccgcttccaccagattcagcttctgcataggcttcctcctttcggcattttcgtttggttttactgcacataggcatgacctccttgaatagatttacccctgcaatgaagcaagggtatgtaacacagccagtccatacagttccacgctttttcaaagcggcgttttctctgtcagtgctatgcacggattgagcaacgggcaggctcatatcgtggctctgctgtccgttgcggcaggtatccctctggcggctgctatggaattttcaaggagcaaatctatcgctatcgttttgcggcaatcaaaaagggcgggaggttttgacctctcacccaacagcccatagggggatatgtttttagacatggtattctgattttttgaaaaagcaaaagcacctgccgcttaaccgcttttctcggtcagtaacaagtgcttgttgcaagtttggtattcagttcgtaaaaggggcgtatctgcccgtgttctcaaatggaaattgacctcagaaatacttcctgcagttcctgttacctgcagcggctggtggatatagatggttcctgtgccaatactgtttcctttctcatctgttactgtggcagtatctccaaggcccactccgctgtccgtcatagtaatggtacatccatcatcagataccttttctactgttccttctatctgcgttccggaagacagagttacagtcaccgtatcttcttctgatggaacggtagcaggatctgccagatccacagccatttttccgtctgcagaaagaacaagaagtgctccatgctccagcatacaggaggttatatcttctccctggcctatatatatttttttcatacgaccgtctatagaagcagaaatggtctcctcatctgtatcctcctgtaagtctgcaatctgttcgtccagcgcttcgattttttcctgtacctcttccattgcctcataaacagaagaagaatctacttctgccagcacatccccgctggaaacgtgatcgccgctttctacctttacctctgaaatagtgattcctgagggaatcttcagggaaaccggagtgtctgcttccagatttcccgttcccacgattgtatttgatatggagctgatttctgccgtcgcctttgttgcctgtactgttttttcaggtgcagacggtctctttccggactgatatctccagtataccccgccggctgccacagatacagtaaggacaactgctgtgcctatgacaatcttcttttttccggaaacctttctttttctgaaaaagcttccgttttcacttctttcctttctgagtttcatcattgtcctcctgctgatttttttacttttacagtttttccggattttttgtttcacaggctctccattccactgtggaggatgctccggaacagtctgcactatcttcataaaccactgtagtcactacatggtcactgtcgtcctctgcataaacagctccatctgttctctgaatgatcactgctttgccttcttcacctgtgattatcctttcagagatctagacttcgccttctgtctcagcatcgtccgcctcattgtcatctgtttcagcgttgtccgtctcagtatcggctgtttcagtgtcggctgtctcagtgccatcagtatatgcggtctctgcctgatattcttccgaccgctgtgactggtcatctcccggctgccccatatctccttccatgatgctgactgattctgcatttccatcctcatccaaaataataactgccatgtcgccttcttttagatctgaccagacgatttcttctcctgcttcctgagccggagcttctccctccggtttttccggctgttccgatgttccaccgttttccgatacttcttccggctgttccgatgttccaccgttttccgatacttcttccggctgttccgaagccccgccattttccggtgcttccccttcaggcatctccgacgcttctccgccaggctgtcccatagtctgttttcggatcaccgtattttctgtaagagcaatagtctgttcttctcctgtctcttctgtgccggaattttcttttccatcttctgttccatttaccggagcagattctacagaaattgtaatgaagtcctcagataccgaaacaatcttaccgaaaatctgattttctttattttgttcttccgtttttcctgttttcccgtccgttttctcatcatcgccttctgctgctgtattttctgctgctgtgtcttcgattccgcttccctgctgttttgccgcctgcgtctctgtattacttccgcagccggtaactgctgccatacacaaaaacattcctgtcaatattgctgcctgtctgtttttcataataaaactcccttcattttagagattcttctcaccgaaaatcatctctgtttcctgtaacaatttccaagtataggggacttaccttaattaaacttaaaaaaacctgtgaaaattttgtgtaatctcaaaatcctcacagggttctatgttattttattatgaagttttttcattaatgtctctgttctttatttccaaacagctcgcaaatctgcatgcaaaggatggctcctggtttcccgcatacagataagaactgtctcccaggcgaatcccccgaaaatatgcaatcccctgttccctttcttcagtaacaacctttgtagctgaggtgggaacaagcgcagggctgtgcgctgtttttgccagaagctatgcctcttttcttcctttttctgacagtgtattatttccataatctggatctccatgtcggataaaacgtattttcataagatcattctccttgtattccggttttctttatcaaaatattccggacactctgtcaaatatattcgccgttttttccagacgcatcaaaacagatctgctcatgcattggcagaaatattcaatgctttcaaaaatcctaaacattatggcctgcacctgttttctcttatagcttctcataaactgttgggctttggtattcgtgccagatcctctggaactgtgcaggaaccacagatggttctgcagatatttctccatgctcaggaataaattatactcatccctgtaatatttctgaatgtcagaccagatttgaatccagctttttcagatcactgtatgtagtccctgtccccagctggatcccgtttctttttgccagctcatgaaccgttaccatttcatatccctgcttttttaactgggggatcaggatctctgccgcatccacagtggtgctgaaaatatcatgcataagaataatggatccgtcctccacctgagaaagcgtggtatctacaatcttctgaggatcctggctctcccagtccagtgtgtcaatggaccacaggatcataggagttcccaccgtttcttttacagatgaattcacagagccatagggcgggcgcaccacagtagccccatgaccggtaagctctgtcaaaagctcatccactcctgcgatctcagccgacatatcttccggcgccagtgtggcaagatctgtatgagaataggtatgatttcccagttcgcatcccagagtttccatcctctttacctggtcggaaaaatattcaatttccttcccaaccataaaaaaagtggctttggcattattagcctccagacagtccagaagccggtcagtaaacgaactgggcccgtcatcaaaggtcagggctatatattttttcttttgcgatttcttcttctgcgaatcagaagcctctttgcgggaggcttctttttccggcgcttttgtctgctccggcgtttttttattatctgctttcttttcagcggctttgtagcccttcagggaaccgtcagacagaagctcatagctttttccttctgtggtaataaatccggtctgcataataccgtccagatccataaaataccgtttaccgccgtcatccacccatccggttttcataatcccactgctgtcaaaaaaataacgctttccatctgtatctgtaagccagcctgtatacgcctgtccgtctaccataaacatccagttgcttccgctggaagtccacacccctttttctgcttccggcgaaacttcaaacggcactggtgtagctgttggagtggctgcaggtgaaaccttttcctcagattcagaaacgtctgttttactgctgccgttatctgcttccggcttttcggtatcttcggaagcaaacagccgaacagttcctccttctaccttcgaagggtacgctgttgactgacgaaacagaagggcgcagcctgtacagataagaaccataaccagaagcagcaaaagatttgtccgcctgttgcgatccggcatatgatttcctccttctttttatgctgtcagttcctatcatacaatatgcgacaaaaaaatacaaccctggcctctatttgattgttgccaataaatcagaaaaataatataatgaaacaatggataaaaaaacaattacagaaaacatcagaatcaataaatacctgagcagcgcaggaatctgctccagacgggaagcagaccagtacacagatgccggaaggatcacggtcaacggaaaagtgatagctacaggagaaaaaattcctgccgatgcccgggtctgtctggacggaaaacctgtttcagcagaaaacaaacaggttcttcttcttttttataaaccagagggaattgtgtgcagcacaaaaaaacagcgccaggaaacaacggtaactgagtatcttcagtatcccataaggatctaccctgtaggcaggctggacaaagattcccaggggcttcttctcctgaccaatcagggcgatcttgtcaaccgcattatgcgggcaggaaattttcacgaaaaagaatatctggttactgtagaccgggaggttactgctccgtttatccgacatatgtcagagggcgttcccatcctggataccgttacccggaaatgcgtagttgaaaaaacaggaaaatacagtttccgcattgttctcacccagggtcttaaccggcagatccggagaatgtgctcttatttcggctataaagtccggactctgaagcgggtaaggattatgaatcttactctggacggactgaaaccgggcgaattcagagagatccggcctgaagaatggcaggaactgacgcaaatgctaaaaaattcatcaaatgaaacaattacaggaggtcattatggaaacagccctgcagcagatgaaagagctggtaaaaaaattaaacaaggcggcaaaagcctattatcaggaagacagggagatcatggacaacagggagtacgacgctctgtacgaccagctggtaaaaatggagcaggaaaccggaattgttctggccgacagccccaccgtaaacgtagggtatgaagcagtagattttcttccaaaagaaactcatgaaacccccatgctctctctggataaaacaaaagacagagaagcgctccgtgaatttatcggaagccataaaacccttctgtcctggaaaatggacggactgactattgtgctcacctatgaaaacggtgctcttcagaaagccgtcaccagaggaaacggagtagttggcgaggtcattacaaacaatgcaaaagtattccgcaacattcctctgaaaattgcctttcagggccgtatggtgcttcggggagaagcaattatcacttactctgattttgaacgtattaatgactctatcgaagatgttgacgcaaaatataaaaatcccagaaatctctgcagcggttctgtccggcagctgaataatcagatcactgcccggcgcaacgtacgcttttatgcattttcacttgtatctgctcaggatgttgatatgcacaattcaagagaataccagatggaatggctgaaaagtcagggctttgaaaccgtagaatatcgggttgtcacaggcgaaacgctggatgaggcaatggattatttttcatccgcagttgcacaaaacgatttcccttccgacggtctggtagcgctttatgataatatctcctacggagattctctgggttcaacgtcaaagttcccgagaaacgcttttgcttttaaatgggcagacgagatccgggaaacaaccttaagggaaattgaatggagtccttccagaaccggtcttatcaatcctattgcagtatttgaccctgtagaactggaaggaactacggtaagccgcgccagtgtgcacaacgtaagtattctccgggaactggaacttggcatcggagatacgatccaggtatataaggccaatatgatcatccctcagattgcagaaaatcttaccagaagcagccatctggaaattccggacatctgtccggtgtgcggcaaaaaagcgcagatcatgaaagaaaacgatgtagaggcgctgtactgtatgaatcccgactgtaccgcaaaaaagatcaaagcatttactctttttgtaagcagagacgccatgaatattgacggtctttccgaggcgaccctggaaaagtttattgccagaggatttatccatgatttcggagatatttttgaaatagaaaaatacagagatgaaattgtagccatggatggtttcggagaaaagtcctttaacaatcttacagaaagtctggaaaaagcaaaaaccaccactctggcaaaagtcatttacagtcttggaatcgccaatatcggccttgccaatgcaaaagtgatctgccgccattttgattatgacctggaagccatccgccatgcagattcggatgaagtcagcgccattgacggcatcggccctgtgattgcaggaaatcttgtttcctatttccagattgaagagaacaacaaaaaactggatcatctgatcagccaccttactattgaaaaagaagaggcgcccaaagatcagacctttgaaggaatgaccttcgtgatcacaggcagcctggagcatttttccaacagaaacgaggcaaaagctctcattgaatctcttggaggaaaagtaaccggttctgttacaaaaaagacaaactatctgatcaacaatgacaaaacatccggctcatcaaaaaataaaaaggcaaaagagcttggaatccccattctgtccgaagaggatttcctgagtcttacaaagggagattttcaggcagaataagtaaaaggcaaggaggatcataaaatgccgattaaaatacagggagaacttcccgtaaaagaaattctggaaaaagaaaatatttttgttatggatgaaacacgggcagtccatcaggatatccgtcccattcagattctgattctgaatctgatgcccttaaaagaagaaacagagctccagcttctccgctctctttccaacactccccttcaggtagacgtcacatttatggctgtggaaagccatgtggcaaaaaacacctctctcagtcatctgaataagttctatcagaccttttccgagctgaaagacctgcgctttgacggtatgatcatcaccggcgcgcccgtggaacagatggcttttgaagaagtggattactggaacgagcttacagagatcatggactggacagaaacccacgtcacttccaccatttttctctgctgggctgctcaggcaggcctttatcatttttacggtcttcagaagaaaaaacttgaccagaaaatgtttggccttttctggcacagggttctgaaccgcaagattcctcttgtgaggggctttgacgatatgtttctggctccacattccaggcatacagaagttcccattgaggatatccgcgcatgtaaagaaattacaattctggctgaatccgaggaggccggactgtttcttgcaatggcagagggtggccgccgaatctttgttatgggtcatccggaatacgaccgcattaccctggacggagaatataagcgggataccgataagggacttcccattgaacttccccggaattattacaaagataacgatcccgccaacaaacctctccttatgtggcgcgcccatgcaaacaacctgtacacaaactggctgaattattacgtgtatcaaagcaccccctacgaccttatggggacgccggattttaaaagtatataaaagcaaaaagcaccagatgcagactgccgcggctagtctgcatctggtgtataaaatgatacaatttcctcaataatcaagggattatgaaagtccgaagcggtctcatccgttttctcatctccagtcccaacggtcaagaatgggatttcttacagcatctgctgaatctcccagccggtacagggcatagcttccggctgttcccacctcctggtatccatatagttcaagttcacttttctgctgcttatccgggatttttacaaccagataattgcagaaaagtctttttccggcagacgcaatgttgctgtaattaaacaccggcgcattgatctccagataaagctgccgtactccttcgccagcgccgccccgtccctctctgttaaacagcatataaatagatggatcatacacacggacataaggtccgatataattatctgccgccagaaggaactctgaatctttggcatcctgctttaccatctcgcagatggcagccacctcatccggcacctgctggtaattatgaaccagcttataatttcctgcctgacaaatgccctttccgcacacagctaccgctcctgccgccgctatgaccaggagaaactgcaaaatgccttttctctccttcagaaattctgtcatagccacagcaataacaggaaccaccggaagaagccaaagaacacgccagtatacactggagcctatacacttctgtatgatcctggctgcaggcgggcagaaaaacagagccagaaccagaaaaagataaaacaacagatattttgtgctttttttctttcttctgaagatcacaagaaagaaaacagctgccagaagcagccacggcatcaggctgtcgccccagtagctctgccagaaatttactgactgttttaatacttctttcatttccatcctcctgtcagcccattaaaatatacacgatccccagggcaatggaaggcaggcagcataaaaatcctaccaatacccgtttccagtctctcctgacaatcagggaaatgataaaaaagcagcctgtcaaaagaggtgcaagtatcactcccatagaggacagaaggcagcagcttatattggcaagcaccagtggaacccaagatatctcctgctttttttcgaggaaaaacgatatacacaaacaaagcagatacggcaaaagtacggaagccaaaacagcttttccctgccagatacgaaccatctgaaagtttcccgcattgtaaacagaatagccggaaaaactgcagatacaagctgccagaagaagatagatcccctgggcctttttttctccgggaaaccatttttttgccagcacagcctgcaccatgtacgccattgaaagaaaaactaccggaaataccatatgtgccataactgcaggatggagccttccgctcagctgacttaccactgccagaaataccggaaacggcgaaagcacatatcgtctgggcagcgccctgtatgcagttcctgtatagggatccacctcaaagatcgtatctgtgtaaacgtctgttgtagccgttgccacataaaaacagtcgtcagcatccatatgagccatcagtgaacacactgctatctgaaggagaataagtaatatggcaatacagaaataaaaggacggacgttttttttctttccaggcagacagaaaagaagctttcctttttccaaacgcaaaaagtccaaaaacggccagtactattccaatgcctccccaggcagcagtcagcacatggagaggcattttcataactgtcataggcaaagtaaggatttccattacagtaaaaagcaccagatatccgttcagaaatgtttctgaaaaaccggactgtttttttcctgtaaacgggattccggcagcggccggtacaagaaccagccagaatcctgccagaatcagtttaaccaccattcccatactatttctccgattctttttgaagaattcccattgctattttttccggtgtgatcggaagttcacgaaccctgacgcctgtggcattatatactgctgcggcaattgccggacaaggagtgtcaattaccagctcacctacagattttgccccaaaaggaccggtaggctcatagcttccccggatttctacccggatatctccgatatcaagacgggacggaatcttatactgcataaaggaattgttgcggacagcgcctttttcattatactgaatatcctcatagagagccattccaattccctgtgcaattcctccttctgtctgcacccgtaccagattcgggttaatgggtgttccgcagtccaccactgccacataatcgatcacctttgtgcttccggtttctttatccacttctacttctgccattcctaccataaaaggcggcggagataccggtgaagaataggttcttgtaacctgaagctcctgagaatttccgcaggttccctgaatggcaatatctttcagagaaaccttatgttcttcatctgtaaatacaaattctccgtcaaaatttacttcctccggatccgcctgcagaatttttgcgccaagagcgcagattttgccgcgaagctcctgacaggactgaactactgccattccggtggtgtaagttgtggctgaggcataagagccggaatcatatggagaaatatctgtatctaccccaaacacaacaatattatctattgaagtttccatacagtcagctgccatctgggcaagaatggtatcacagccggtacccatatccgcacatccaagtcccagtgtataggaaccgtcttcattcagcttcatatctgcgccgcccacgtcaattcctgcaatcgaggaaccctgcatggccatggcaacacctactccgcggacttttccatttccaagatccttacagggatatttttcatcccagttcatcatttcctttgcccgttccatacactgatccatggtacagctttctgctgtatcacaatctccgtatgcaggaagaggctctccctgaagaggcatgttcagctcccggatctttaccggatccattcccatgatctcagccagctcgttcactgctgattcaactgcatagattccctgtgttgctccgtatccacggtacgctcctgctgcctgtacattggtataaacaacatcataggcaaaacgataagcttccgtatgacgataaagggcaatggatttatgcccgcttaatccaactgtcgtaggactgtgttctccgtacgcgcctgcgttggaaagagtataaacatcaatggcgcgaacgattccgttttcatctgcgcctgctcttacacggatctccatctcatgacggggagatgcgcagatctgggattcgtaacgggagtaaatgatttttgacggacggcctgtcatccaggtgacaaatgcaggataaatctcacagacagaagtctgctttgcgccaaatccgcctccgatccttggcttgatcacacgaaccttcgaagagggaatgtccagagcatttcccaggattcttcttacatggaaaggaatctgcgtggatgataccacattcagacgtccgaaatgatccatataacaataggtccggaaagtctccatcattgcctgctggtttgctttggtgtgataggtccggtccacagtatacttacattcgccaagaattttatccacatcaccggattcctccagccctgaagcacagagatttctcttattatctgcccctactggtatttttgcctcccagtcttcctccggatgtaccaggatatcagcatcttttgctttatgcatatcaagaacaggctggtcaacctgatattttaccttgatccgtttcagcgccttgtctactgcctcctctgtttcgcctgccacaatcgccacagcatcgcccacaaatctcagtctgcggtcaagaatataatgatcgtacggactcagctccggataagtctgtcctgcaagagtaaaacgctttttgggaacatctttatatgtataaacagcggcaattccgtttacctgacgggcagttcctgttttaatctcctcgatccaggcattggcatgagggcttcgcaaaactttgacaatcagacaatctttcggcgccagatcatctgtatataccggctttccggttacaagcgccatggcgtctttttttcttaccggcctgctgacatagctcattcttctgcctcctcctttttctgtgattttttatgttcaagatacttcaggatacttcttgtctgtcccacaaacccggaacatctgcagagatttccggcaagatactccttcacatcctcttctgaaggattctcaagttccttttccattgcaaaaacattcatgataaatcccggattgcagaaaccgcactgttctgcgccttcatctgcaaggaaagcaccgaactcctctgcctctttctgcattccctccatggtcacaatttttttgccttctgctctcagcgcaagcgtgctgcaggaaagtacaggctttccgtccatcagtacagtgcataatccacagttcgctgtctcgcagcccctctttacactgtagcagcctttgtctctcagaaaatccagcagcaatgtatccggctcaacatcatcgtgacggtaaactccattcagccaaaaactcagcttcattttttcatccctcctactgtttcccatgctcgccttgtgagtacctgtgtgagaagctttctgtagtcttcagaagccctcatattagatcccaccggcacatgttctgcggcatagcgggcaaaatcctgcgctgcctgcggcttctgttttttagtcatttcaccaaagcctttcagaatcccttccgaatcctcaacaatcatagcccgtccgggtctcgccccgatcacggttctcggcatgtctccaatcagagaagccgcacaggtaagaaccggaaaatccgtctcagaatttctctggcttaaatatgtgactttaagcggtgtcttttttacgatcacagactggagaatatccctgtcttttttctgtgttacaaattctgtaagcgggattcttcctgcctgatacatatccacccaggtatccattgcaagaaacatggtcaaaacatcagaaaatccatatcttccgaaaatactgcctccaactgtagcgcagttccgaaactgcacccctacaatgtgacgcagactctccctgactgctcctcctgtaaattcattcagagctgcatttgtttccagatcatgaagtgttgtcatacatccgatcacaaattcatcttccagctcctgaacagtgtccagtcccagaccagacagatcaattgctgtggaaatatttcggtttcccattttcagccataccataccgccaagcacgcaggctgattttttctgattcagctcgtaagcttctgcaatactgtttactctttcatagcttttaatctttagcatatgaatttcctttcttatataaaatatatctgctgcaaaaacagaaggtgtccatgcccttctttctgtgagcgggcatacttaatttaagtttaacaggaacatttcaaaaaatccagtaaaaaattaagatttcagagataagaaaaattccagagaaaaattttcctctgtttacgatttgccatattttaatgataaacgcattttaatttatgtttatcattaaaatatagttgataaagatataaattatgatatgatgtgagttgtgaaatgaaaggagcttaattttatgaatcagttaaatttaaaaaaatcaacacatttattatcagttgtctgcaccattattgttgcaattacaatgatagcaaatattggcgccatacttcttttaagtggaacattattaagtcagattattagtccggaatacttggtaacacagatgatacaagcagacatggggttgagttttagtgaatggattatattattaatttgtttcatcataaaatgcagctgcatgttttgtatggttagatactcaaaaaaactatttagttgcatttcaaaagctgaatcgccttttactagcaacacaacaaaatgcattgaaaaaatctctattttgcatttttatctgtgatatgtccgatatatccatattatcacctcagtgtattgttatttatagaaggaatccttgtagctttggttttgcgaagtattgctctgatattccattatggatgtgaactccaacaagaattctatgggcgtccctcattggattgatttatttgggcgccctgtatttccgttattcctgtttcttgccgcagatagtttttactatacccacagcaaaaagggatatattaaaagactgttgtttgcaagttggggtatgacgattttaacctttattgtgcaacggctcgttcctaacgatacgattatgctggcgaacaatgcgttcagcacattttttgtcgtagcaatatatatgctaagctgggactatataaaagcaggtataaggaaaaagaataagaaagatattggaaaagctgctttgtttatgcttttaccaatcctgtttatgctgccgatggttctcatgagctatctcatttcatctgggtctacatccggtggattactccaaacattggcatttatttctatgctgcttccgaatcccgtttctgttgaaggcggcttactgtatgttttgatggggattctgctttatatttttaggaaaaaccgtcgtatccaaattgctgttgttattgtagttggggctattgcgtattttagatttggaggtgtacaatgggctatcttgttagctctgattcctatggttctgtataatgggcagaaaggaaaaggatttaaaaattttttctatattttctatccaacccatattattgccttgtatctattagcaacacttttaatgaaatgataattatattcgtctgatcggatataaaccttatacaactaaatacccgctacttaccagaacggcgaaaaactgttctgtgaatacgaccagcaagtgaagcactacccggaaaagcgtggtatctgccacaatgaaatcctgctttgtgtgcaaaaacggcagttctgtcactgaactgccgcttacataattacataacatacatatacagattaaaattttcgtttaacccttacagcatacactctgcaggagccggaaatcctatatctccccgtacagggccagacagctgaaaatttatatttttttcagaccatcctctcttatgatcattgatctatgatccctgagtatttctatcggttgttaatagctgtcacaagcgcgtcaacagaggcatggataatatccgagtttacaccggcgccccaggaaagactgccgtccggcttctggatacccacatatgcaatagccttggaactggagctctgctccagcgcatgctcctgataggttacaagattaaacttaagttcatatgcctttttcagagcattgctgactgcgttaagacgtccgtttccggcagcttctgtggtagttgtttttccgttaaagctggatgttacctgagcaacaaagcctccgtctttctgccggaaatgaacctcatccacacgatatggctccaccacattttcaaaggtctttttaaacaggctgaaaatttcttccggatgcagctctttatgactgtggtcagaaacagccttggcagcataccccattgcctcccgcatttttgccggaagattcagaccatactgtgtttccagaatataacctacgccgccttttccggactggctgttaatacggatcacatctgcatcataatttcttcccacatctgtaggatcaataggaagataaggaactgtccagtgacccggatctttttcctctctccagtgcattcccttggcaatagcatcctggtgtgatccggaaaaagcagcaaacacaagcgctccgctgtaggggcttctttcatctaccttcatgcccgtacatttttcataaacctcacagatgcccggcatatctgaaaaatcaagccccggatcgactccctgagaatacatattcattgcaagagttacaatatccacatttccggtacgctctccgtttccaaaaagagttccctccactctgtctgcacctgccagaagtcccatctctgcgtcagccacaccgcagcctctgtcattatgaggatgctgagaaagaatcacatgttcccgatacttcatatgagtgctcatgtattcaatctggcttgcgtacacatgaggcatggaaagctgaacagttaccggaagattgataatgcatttattttccgctgttggtttccatacgtccagcaccgcattgcagacttcaagagcatattccggctctgttcctgtaaagctttccggactgtactcaaactggaaattgccttccgtctcctctgccagttcttttaaaagctgtgcaccttctacggcaatacggataatttcttcttttgactttttaaatacctgctctctctgtgctacagaagtggaattgtacacatggatgatcgcttttggagcgcctttgaccgcctcaaaggtttttctgataatgtgttctcttgcctgagtcagaacctggatagttacatcctccgggatcaggtcctgctcgatcaaagttctgaggaatgtatattccgtctcagaagcggccggaaaaccaacctcaatttctttaaagccaatttttacaagaagcttgaaaaactctattttctgctccaggctcatgggaatcacaagggcctgatttccgtcgcgaagatccacgctgcaccaggacggagctttttctacatattctttttgcgcccactttgtacacttttcaggcggcatatgatactgcctctgatatttttttacattttccattctttttccctccattttcgtatcatgcgttttcaatgtgagatttctctttataaaaagaacaaaagcatagcgaaaaaccattttcacagactgttccattcatattttccagatatttctgccagtatgcagaacagtacctttttacagaaaaaatatataatagatttctctgcaaaagaacagaacagacaagacagcttcgaactctttccatcctcctggagcatttttatataccagaaaaatcaatacagaatatgctgcttttccggtatacaaaaaaatctcccatctctacatttctgtaagagacgaaagattatacttccgcggtaccactcttctttatgaacagtttcatacactcacaggatacggaatcttcctcttgcatctgtctgctgaaaatccttatatcccttccatataacggtggattccgtctgcgcctactaaccactggctttggggcagatactccaaggtgagttccatgattcccttctactgtcttccaccagccgacagctctctgtgctccagttttcatgtactattccttatcaacgcatttacgtattaaattgtttcgatggatatagactaacacacatgatacaattctgtcaagaaattttttcttcaaaaaattgttgcaaaactatacacactttgatataataatcatcaccggggtatggcgtagcttggtagcgcgcgcggctgggggccgcgaggtcgcaggttcaaatcctgttgccccgatttatatttaagaatgaaagatttccgagatttcggaaatcttttttgtttatcaggaaacaggaaagtagtacattttatacaagtctttccagtaaataaaaacactccgcgaatatgcaagcagatgcagaaaaacgaaaaagcagctcccggttctttgtctggttttcgtcttttcctttctgcaggacaggacatcggaacagtacctcagccccgcccttctgtatgagagtaaaaattattttagctttgtgattttataacgggaagtgtattctctgccagactgttatgagaatatccgtcatagcgttttttccgattataaaaggttatagaagctttctgatgatcttgatcaaggctgacagttccatatgcaatatctaccggaaccaccccatatgcaggttccctgccctttataatctccacgttggaggtgtttgcctgagcttttttcagatagtaacggagcaccggcttttcatatacctgataagttcccaggggaatattggaaactgtcacctccaaaagcgcataaccatttccgtccacctgatatgcatcctgcataaaaacaacagaatcttcatatttccgtttatttccgcgaatatccgtgccctcgatcacaaaagaaaacgtaggatttccatgcgcccaggtaatttctgattcaaggatctttttaataattgtgatctgtcctgtgggaagctgaacaggttcattttccgcctccagttccaggatctgcccgtcttctgtcagatggatttccttttcccattttccctgatacccctgtggaactctggtttcctttatcataaatttcccctgattttcatccgtaagttccagctcagaacatgtgtaacactgttctttttcctcatagctaaaaagaactgctttttcttcatagcttcctgctgcttcattccatgcataagcctgaaattccgcacctttcagcttctctcctgtaatggcatccttttttctgatatgcacagttccgtactttttggggattggatcatttttcacagagaactgcagttgtacgtcctgtttcatcagatcaatttcctgactccattctccctgatacccctgcgggttctttgtttcctctattcgaaattttccctgattactgtctgtgagcttcaggatctgacttttataaatctccctctgctcatcgtatatcagtgctgttccctctttttgatactccttttgttcctcattccactcataaataacaaattccgcacctttcagcaaacctcctgtctcagaatccagcttacggatttccaccatgtgttctttaagaggagcattggttacacgataagtaaatgttttatcagttcccggttctgtaagtatcagttcctggctccagcttcctgtgtatcccggaggattttttgtctcctctactttaaactttccctgatttatttccgtatacacaaaaacatctgaaatatattttttctgttctttatcgtacttcaaaagttttccgttttcatagtttcctgaatttttattccaggtaaacaaagtaaattctgctccctcaagaaaaattcctgttccgccagcaacctttccaacagatacttttcccttcatatccggatcatcttttacctccagtgtaacgcgtttcccggaagaaacagtacaggatgaagcagaaactgtgatcagatagccgggagccgccgttctttctttcacatagtactttcccggaacaaggctgtcaaaaagaatctctcctttctcatttgtagttccctctgcaaccttttcatcctttgcgtaaatgcgtatgcctccactgtacagatcctgtcctgcatatagagaatatactgcaccagcaaccggctggcctgtcagagaacttgttttttggagaagaatacttccggaaggctgaaacgaaagatttaatttaagaatccccctgtctccctggtatacgcaggctccaaaatcctgaatatcctgtccagtctgaacagaaccatctacaataatatattttacaggtctcagtgtcattttccaggaaaactgtttcgtaccttttgaattttccggaaataccagtttaaaacagtatccgtttttcatctttacactttttccctttgccaaacgattagggctatccggtttttcttttgccgcgctttcactggtccagtaagcaagctgccacgcatcgttagttcctctggagattgtcagtccgtttccggcttttcctgtatctattactgtacacaaaggtgaaatctgaaatccgtttttaaatgttgactccagccacccaaatccggaggacggtttgatccgatacagggtcataccaatattcagaggattggctgtaacggtattgccgctggtattgactgatttaagttttactgcacttcggctgggaatggtgagacttttcagtttgtcaataaaacgaagcagccccacatgcttgatctgagcttccgtcgctccatttacatcattggcatatactttggaaagcgcctggtgagtaaatacatatctgttctgccattttgaccagttcacatgggaacagctcggattataactgtcgcagatatctcccggtcctccatatccaaaataaagaatctttctcagagtcgaattggaaaaaaattttactgcgtccggcttcagatccacgtttccgtcaattcccattttagacgccttcatacaataaagaggcgatcttgttaccgctccatctgaatctacatactctatataacgcagtcgggcatgaataggagaatttgcagtccacacttcatcacagtttacaattgtcgaagtggaaataagtctgtacctgtccggagcaagcagaactgacgcatcctcttctgacatcagctctgtttcaccaatatctgtaagagaggcaggggcaaatcctacaatctctccttcttcaatttccctgatcagctgttcatcttccggtgtatctccaaaaagactgtctgcattatccggagtaagaatggttcctgtaaattcttccgtaatctcttccggctctgcatgtggcttttccccatcgaaatcttccggattttctggcgcttcttccgaagacgcgtctccctgcatctcttcttcagtatcttcctcaaccttaatttcaggttcttcctctaattccagcccttcaaactccccttcttcattttgttcctgttccattgtcccattgtgttcttcttccggaatacacaggctccctgccggcgaagacagtcccatcactgctgccagcaaaaaactgactactgtttttttcatttcctccgccctcctttcctgcagataaacactgtcaggatcacagctccggaacttaaaagaatcatgaatgctgcctccggttgtgagaaatctcctgtttttacagaggagactttttgcgcttttttatgacctgaagcttcactttttcctgaaccagttttcttttcagaattttcatttaccgtaaatatccactgcacttctgcatccctcaatgcgtaggaattatcccattctgaaggtattgaaagggaaaatctcagttttcctttttcatcaggagaaaatttcccaagggagtgatttttactaagtccgggagaatccagagttccctcgtacagtctcgtatcatccatatctactgtaagttttactcccttcaaaagctctgtctggcttttgttctgtccttccactgctgtacggaataatatttccgcttcctgatccgttgtattggaaactgtgactgtatcctgaaatttatctcccggcatggcagttcccatattcacaaaaaagtcacccggaacagacaaaagtttatgagcctgtccgttaaactccactgacaattttgtttttttctttctgcatacagttgtaccattctcttcatgaacacaaagctgtatctcctgatttccccatggcgacattgctttaaaatccggattaaaatttgccgcctggattgcctctgcctgaacggtaattccaagctgctgcccggtatgctcctccgtccatgtttccggaactgttacctctttaaaaagatctgtactgtccttccgtttcagaatacttgtatagtaataatactcacctctctgcacccacttttttgacattccggatatatttttgtcactgaatccctccatattctccctgtcatttttgtaagtgatccgtgcccgcacccagcaggggcttgcataattggtgattctgggaattttggatataacatctcccggaactactgccttggttcctgcaaaagatacctctgtacttccttttttttcatattccttcagtccgatattaatgtctcctgtggaaatatgatttttcacctttaaagtatctgaaaaatatccataagtaccggttcctcccagaaaagcagccgctgttaaaaccgccgctgctttaatcagctttttcatctgcaccaccttcctttcagaccggagagccataatattcccaggccttttcatagtcagaaaatccggcagactgaacagactcctcgtatacctgtattttaaattcaggcaaaagatccagataagtatcatccagcctggaagagtctatagatactcctgtaaacaaaggagcagtggtctctccctcttttaaaatatggcgataataataatacccgtcatctctatgcacccagttatccgtatccagattcttcagaaccactgcctttccgatatcattattggaatatcccagcgaaatccgtacaaaacagtctacattaaagccctcttcccctgacgctgtattagatacccatacctttttcttatattccggatttttatcaatgggagtgggtgttatattgggaaactcttcctctatatctgttgtattatgtcctgctgccactgtattctcagctttgtcaaaagacgtcagatatgctgcagttcccccgattcccaacgctgctgccagtatcagtgtcacccctgtaatcttttttcttccggtcatttctcacatctggcctcctttttgtcataacggtcatgttgtcacctgaccttcctgctctttattctgatttacatattttttataggcttcttttgcctgttccggaatactgtctttatctcctcctgtataggagctctgaatggcataggctcttacaggaatactgatctgctgtgtgtccagctgtccttcaataatattcaggaatttcaccatgtcaaacaacggctccgtggtctgctccggtttcaatattttatcgtatgcatatacataaacagctgccgtttcttttttctttttgtcgatcagggaccagttttcctttgctgtaaaggtaaacagttcctgcatttttttattcagccggttgccctcctcatccgctgccatcacatctgccataggaactgttacttccatatacacaaatgcatcattgactcccgtgttttggatttgaggatccttttctatttcttttcccggttcgatcttcgtatgttcttcctgtttccatcccggctcttccagttcaatttctacttttcctactgtaaactgattatcagctttgtcataatctgtcagatacgcagaaacacccccaagaacagccagacacaaagcacctgttaaaaatatcgctttacttttatttcttactgattttttcatattttctgtctgtgcagaactgcctgcacactcctttccattgcattccaagaaaaaacaattcctgtatgagcataagactgataagaccaaatacgggtttgctcttcaaaaatgctgccacatatcccaaaaccggaataaaaaataccacagttccaacaatctgttcctgcataacaggagccgcatcctcaccttcattggcatcgcctctggtaatataagcagaatccctcttatcagtaaccctgtgtgtgaccagcatatcatccatacgatacgtaataatatctccgatccccggcatggtcttttttgtgtctgtaaaaataattccaccggttttcagcgccggttccatggaaccggataatactacgttcacagaaaatcttttaaaagcagcaagaatcaaaaatactccggcaatagctgcaagcaggattcttcccgcatactctctctttttcatatgctcatcctttcctgtctgatcaaataaaaacagctccgctttcttttggcggagctctaccccgcagatattttttcatagatcacgcccgctttctccttctttaaaagaggtttgatgaaatgaaatgttctgaattgaaatttaagaataaaaaagaattgaatgacacctgacgataaacagatcatatgctctgctctgaagatcccctgtaaggagaaggcggcgtattcttttatataagaccaaggaaatatattttccttaaccttcgcaataaataaaactgctgtacgggaagaacaaaggcgtcccgttctgtgtatatccaaataatccgtttatggaatttccccgatattccttcagaagaaggtggtgcaggaagaagctcctgcttgttaagatgattttattctagtcctgccaatacaaaaagtcaacgaaattcgttcgccaaattacgcctgtaaattatgacatttttcttattttgttctgtctgtaaaaaccacatgtttttttaattgaaatgcctgtaaaaatgtgtccgattcttttgtatttgcctgtgtgtacccataaaaagcctgatcatttttgtgtgcatatgccaggcttcattgtgccatattcagtctttctccgtttacagaaaacaaaggatatagataaaagtgataaagccaaaaaatcagcttccgaaacctgtcccggatccggaagctgatatatgtttatttttcggtttttgcattaatataattgatcaaaccgcctgcctgaataatattctgcataaattcaggaaatgcctgaccctggaactctgttcctctggtacggttataaataacgcctgagtcaaagtccacttcaacctgatcgccatcctcaatccctctgctggcctcaggacattcaataataggaagcccgatattaatggcattacggtaaaaaatcctcgcaaaagtctctgcgatcacacagctgactcctgccgccttaatggcaatgggtgcgtgttccctggaagaaccgcagccaaagtttttgtccgctacaataatgtctcccctgtttaccttatttacaaattccttatctatatcctccatacaatgtgttgccagttctgccggatctgaggaattcagatagcgtgcaggaatgatcacatctgtatctacattatctccatatttaaaaactctgccttttgcctgcattcttcttcctccttataatcccagttcttccggcgctgcaatttttcccatgactgcgcttgcagcagccacagccggacttgccagataaatttcagactccacatgacccatacgtcctacaaaatttcggtttgtagtagaaatgcatctttctcctgctgccagaatacccatgtatcctccaagacagggaccgcaggtcggagtgctgaccactgcacctgcctcaataaagatcttcagaagtccctcttccattgcctgaagataaacagactgtgttgccggaatgataatgcagcgcacgccctttttcactttgcgtcctttaagaatctctgctgctgttctgagatcctcgatccttccattggtacatgatccgatcacagcctggtcgatcacgatctcctggctgatctcattcattgtttttgtattttccggaagatgcggaaaggcaaccgtaggttccagcttactgagatcaatggtatactctgcctcatacacggcatcctcatccgcctcatacactttataagatctcatggaatgttctttcatataagcttccgtctggtcatccacagggaagataccgttttttccacctgcctcaattgccatgtttgcaatggtaaaacggtcatccatgctgagattcttaattccgtctcctgtaaactccatggacttatataaagctccgtccacgccgatcattccgataatatgcaggatcacatcttttccgctgacccactttttcggttttcctgtcagattgaatcgaatggctgacggaaccttaaaccaggctttgcctgtgaccattcctgctgccatatccgtacttcccacacctgtggaaaatgccccgagagctccgtaggtacaggtatgggaatctgcgcctataatcacatcaccagctactgtcagccctttttccggaagaagcgcatgttcaattcccatttctcctacgtcaaaataattgctgatctcatgcctgcaggcaaactctcttacacatttacagtgctctgctgatttaatatccttgtttgggataaaatgatccataacaagggcgattttatctttgtggaacacggtatccgctttcattttatccatttcatgaatcgccaccggagatgtgatatcatttccaagaaccagatccagttccgcctctatcagctgtccggcctccacatgatccagccctgcatgggcagccagaatcttctgtgtcattgtcattcccataatctatgtcctccctgtaaattcatacagccgttttataaaaactgcagataattttctttttatgatgttattttatcacaggctctgatataatactaatacatattattcatacttattatgttttacagttatattaaggaggctaattatgcaggaaaatttatccctttatcatattttctatgttacaggaaaaacaggcagtatttccagagccgcaaaagaactgtacatcagccagcccgctgtaagccgtgctgtacagaagcttgaacacaaccttaacaccttgctttttaaaagaaactccagaggagttgcccttacccctgacggaaaaattctttttgaaaaaatacaggcagcctttgagcttgtcgatgaaggagaacgtgccatccttcataacggttccagaaacgttccgcagctccgtatcggaaccagtaccacgctctgccgatatgttcttcttccccggctgaagccctatatcctgtctcatccccaggtgcggatcagcatttcctgccagtccacttatcagactctggaacttcttgatgaagaaaaaattgacatagggctgattggcagaccccataatcttcagggatattatttccgcccggttatgacagtcagcgataccttcgtttctaccacacagtatttaaaaaacctgcaggaactctatcctggggagcctctttttcacaatgcagtatttatgatgcttgacgaagaaaatatttcccgtcagaccataaatgcaagaatgagggagcaccatatggaaccggcccatattctggaggtttccactatggatcttctgatacagtttgcggaaacaggactgggaattgcaggcgttgtccgtcagtttgtggaaccggagctgaaaaacggcgttctttgcgagatccctctggattttgattttccggatcgggaaatcggatttgtgtgcaaaaaaaaagacagaggacttcccctgctccaatactttttcccggatatttaaaaaggacaggaaacttctcgtttcctgtccactgatgtactgattttagttgttgatcagcttgtcttcgccgttccagctgtacagcttacggatctcttcaccgactttttcagattcatgctctgcagcaagctttctcattgccttaaagtgaacctgaccgcctgctgaagacatatccagaaggaaatcttttgcaaaagtgccgtcctggatgtccgcaaggatcttcttcatagccttcttggtatcttctgtgatgatcttcggtcctgtaatataatcgccgtattctgcagtgttggaaatagaatatctcattcctgcaaatccggactgatagatcaggtcaacgatcagcttcatttcatggatacactcaaagtatgcgtttctcggatcataacctgcctcgcagagagtttcaaagcctgcctgcatcagcgcgcatacaccgccgcagagaactgcctgctcgccaaaaaggtctgtttctgtttctgtacggaaagttgtttccagaacaccggctcttgctccgccgattccgagagcataggcaagcgccatatcaagagcttttcctgtggcatcctgctgaacagctaccagacacggaacacccttgccggcctgatactcgcttcttaccgtatgacccggtccttttggagcgatcatcgtaacgtctacattcttcggaggcacaatacatccataatggatattgaatccatgagcaaacatcagcatattgccttcctcaagattcggctcaatatcgtttttgtaaagagcagcctgcttctcatcgttgatgaggatcataataatatctgcctgttttgctgcctctgccgctgtatatacttcaaatccctgctcctcagcctttttccaggatctgctgccttcatacagaccaatgataacatggcatcctgactcctttaaattcagcgcatgagcatgtccctggcttccgtaaccgataatcgcaatcgtcttaccatccagtaaacttaaattacagtcttcctgataaaaaatcctgtttgccatttttatttcctcctaagtttttataaattttttcataatatatcgtcaagggattcccctcagcaatccggctgaaaaatcagaaaaatcttacatctgccgctcctctggaaagtcctgtgatccctgttctggcaagttccagaatctcatagtcttccagaagatccacgaacgcccccagcttacttttacttccggtaagctcgatcacaagggaatcttttcccacatcgatcacattggcgcgaaaaatattggcaatagatataattccttctctctgctccggtttcgctgcaacctttaccagaaccagctctctgctgacactgttatccggctccagtaccttgatatctcttacatctaccagctttgcaagctgttttgtaatctgctccaaaatcagcgcatctccactgcatacaactgtcattctggaaaaacgctcatctgccgtaacaccaacggaaagactgtcaatgttataacctctccggctgaaaagtcctgaaatacgactgagcacacctgcggtattatctactaacagggacaaaattctcttttgcataacacacctgctttcaccactttagtcctgtaaacctttacttcataaaaactctgcatggatatcattataacaagattcaatcatttgtcaatgtaaaaatgtatgtttatacaagatatttatttttcagggtttcaattgccttaggagtcagataaagcgcttttttcagaaaatgttccacagaaccgaaatccttttcaattgtgtcaaaaactgtgtccagatattcccctttgaccttataaagaatccgcactttgtccattaccttactgtctacaatggtttttgtttccagataacggaccatatgctgcatctcctcttccagataaagatttgttttcataaaatcctcacggatggtttttctgggaaccccaagagcgcagagaagcagggcggtaccaatccccgcccggtcttttcctgcactgcagtgccacagaacagcgcccttctcatggttcagaaggatatccataaaacgagcatactgcttcactgaatactcgtccttgacaaagctgcggtactgattatgtaaaaaatcatcgggaagctgaccggcttctgtaatcagctccaggaaacttcctgtctgggaaatcccggccgtctcttcatccacaataggaatctcatgataacgcactccctcgatcacagtatccggtttttccaggatctctttctgggttctgaaatcaatcacttccgtaagatgatattcttctgtgaggacatcctggtctgtcagagaaatatgataaagactgccgcttcttaaaagacgtctgggaagaatatgtcttccgtcctctgtcatcagcgctcccaggtctctggtattcggaagactctgcaggtggatcctgcctcctttcggaaagcccaccacaatgtcaggattcagcgctttcagaagctgtacacagtctcttacttccctgtctgtcatatcaaatttatagcgtttgcgtcttctggtcacaaccaccagataactggtgctgatctgtttctgagcgccgccttccactccttcctgtcttttataaacccacaggatatccctgcatggaagatagttcatcatcatatgtctggcaaagaccaggtttccatcttcaatccttattttcccatatttcataatgatccccccattgcagatttccgccatgtttttccattggctttttctctctttctcttattccctgtgatctgtcgcaggttcagcagacttttcccattttttttatcatctgataaaccgtttccagactgtacggaaaaatattttcatccagctccatcttcggatgatgaagcggatattcttttcccggaactgctgccagaaaaatcaaaaagactccccttgtcctctggaagtagcgataggcattgtctcctgccagaaacagttcatcctctccctcaagaataaaacgctccccgaatacctcctgaccgattcctgctgcaagctctgtaaactcagaatcgtttgcaaaagaaagcacaggttcctttaaaagactcagagtgatctttgttccggtttctttttctgtatttttcagacgttcctccagcagacaatacagtgcctgaaaatcttcttctctgcaggcccttatatttccggtaagcgtcatggaatctgcaataatatttccgtattcacctccgtgagccgttccgattcccacaagacagggcgcatgtccctgatagctttcgttaaggtcatgcacctcctgtatcactctggcgcctgcataaatactgtcaattcctttatgagcttcactccagtggctggattttccttttacctcaattccgattcctgcaatcatagcagaagcctggccttcgtgaaccgccattccaaagggcatatccacagcaaaatgaaacatcagaaaagcatctgccggaccgtccagggctcctgcttttatcatcctttttgccccttctccgatttcttctgccggctcaaacaaaaatcttacatttaccggaaattcttctttttcctcagaaagaataccgcataaagtcagcgccactgccagaataccgtcatgtccgcaggcatgcatacgccccggattcacagaggcatatggaagccctgtcttttcttccataggaaggccgtccatttctgcccttaccaccacagtttttttcctttttttcagctcaggcagttccgcgatcattcctgtaggaaaaaccggggtaatttcataccccagtttctccagatagctttttatatatgccgatgtttccttttcctcaagacccagctccggatgcatatgaaagtaatgcctgtgccggagaagctcttctttatagttttccgcctctttcattaactgaacatctctttaaatgtttttttctgttccactgcctctgtaacaaaagccatttttgaagtatcgccaataagaatagctccgcagagacggttgttcaggaaataatatttctcatactgcttccgtcccatgtctttaaattccacagttctgtaaataagattcggattttttccattatctccgatggcataaagacctgtgttcattccgtggaaagaaagtcctgctgaaaccgtagtatatgtcagcgcatctcctgccgcattggctcctgcaacctttccctgttccagagcctgaggccagatggcataattgattccttcatattccgcgcagtctccgcaggcaaaaatattctcgtcactggtactcatatctgcatttaccacaatgcctctgttaatgtcaagtcctgcattttttgcagctcccacatttgcgcgtactcctgcagaaacgatcaccagctctgcgggaaattctcttccgtcagccagttttacacccgttacagagctttcgccctcgattgacgcaatctgaactcctgcgtgaatgtcaattccattactcctgctgatgtctgtaagcatctggcttgcgccctcatcaagctggcgtcccatgatctgcggcgcagcctccagaacaaccacctgtttgcggttttttttcagctcccaggcggcttccagacccagaacgcctccgccgatcacaaccacattctgtactctgtccagcattgcctcgatcttttcgatatcgctcatacggcggatggcaacaacctcaggcttgtccgttcccggaatcggaggcacaaagcattcggaccccagagcgtaaataagctttgtatatttcaatgctgttccgtccgaaagtgttatctcttttttatctgtatgaatacctgttacttctttttcaaggagaaggtggatattgttctcctgataccaggcttccggctcaaccaggatttcttttgcatccagctccgctaccatggattttgtcagcataggacggttgtacgtaggataagcctcatttgagatcatgatcacagagcctgttttatccctttcacgaattgcttttgccgcgcttaatcctgccgcaccgtttccgaggatcacataaaaatgatctgtatctttacggaagctgctttcttctgcatctaccggcacaaaattctcttttcccacaccgcagaccgggcagatttccatggatgaatcaaagatctcaccgcagacaagacattttaccagtgtgcgtgaaccttttttcttcggattctcttttttctgaagaatgcatccgaaattatatccgtattcataggcatccagaagattgttttcgcctggtttaaaacgaatcttcagaccatctacaaccttcatgcgaagctgtttcagtctctcgataatatgaggaactccctcgccgctccatccgtagcttccaaaggcgcttgccagctttccgccgtgtgttccggcaaatatggaggtagtcagatcccagattggttttaaggcctctcctacgattgtgggagtaccgaacagaataccgtctgcaaagcccagttcctccagcaccttgtcctggtcagcttccacaaggtcatagcttctgacatcaatatcgccgctgtcctgaatacctcttgaaatttcttcggcaagctgcttcgtataaccatatgcgcttacataaggaataatgactgtttttttccggttgggatttacaaccgtacaccagtcctcataaatgttatacatacggtcgatattttcatcgatcaccggtccgtgtcccgggcagatcatggatacatcaagctgacgtaccttgtccagagcctttagcataaacggcttaaagggtccgataatacagtcaaaataatattttgtagcacgcatatagccttcctgatctgtgaccttgctggcaagaacatcatggaaaccataatgagaaccaaaagagtcgcaggttacaagaagctgttcttcttcaatataagtatacatggtatccggccagtgaagattgggaactacaaggaagcggagagtttttccgccgatttccatagtctgattatcttttacagcaatggaagtaaaatcatgatttacaatttctttcagaaatccaatggcgcagcctgtagctacgattttcatctgagggctgtactccagaagtcttccaatacttcctgcatgatccggctctgtatgatccacgatcagataatcaatttttgttacatcaataatttctttcagcttgtcaagatattcgtcaaaaaatttctctttggctgtctcaaaaaggacgaccttgtctccggctttccatacataggaattataggtagttccaaattccgtatacatgataatatcaaatacccgaagattatcatccacaattcctgcccagtaaaaaccatcgcgtaattcaagcgttttcatccaaattccctcactttcctgtaaattattctgtttctctctttcagacgaaaagcatactctctgtctgtcagaatctgcttcctgttccgatcagtcccagcttttccagcccgttttttattccataatggaacatatccgtggtaatatgatctgccagctctttgatcttctgtgaggcatttcccattgccacctttgttgccgcatattcaaacatggaaaggtcattattgctgtctccaaagacaaccgtatcctcccatggaatattgtagattctgcacaccgcagctattcccgcagctttgctgcagccctttggtatcaattccactgttgtccccacaaaagaattattttcatgacggatcacatcgtagtaggcggacagctctttcagagcctgctctgcattacagccttctttcatttttgcactgatcttattgatcctcatagacttttcattgcctttaatgggacgccactttggtccaagagcttccgtgataagatcccggtaccagtttacttccagtgtatactcatccttgtcataatacataaaatccgccccttccattaccgggaccagaccgtatctgcgcaggatttttacagaaagctctgcaacttcagaagacatctccttgttaaacagccgctggccgtttttttctatggtagcgccacaggcgctgatcattccggtaaaagggatctgttccagatatcccggaacaaacgccctgcttcttcctgtacacagccatgcctcatgtccgtttctcacaagctgtgtaatggctcttaccgcgctgtccggaactcccttctctatatcgcagacagtaccatccgcatcaaaaaataccgcttttttattcatttttcctcgtctgtctttcttttatgctgttattttcaaaatcagcctgtattcttttacgcaaaaaacagttctgctgcttttaccagactgtaggtgtccatcactccggctgtctcataaggagaatgcatagcaagctgaggaagtccgatatctaccgtgcttaccggcacctgagtattggaaatatttcccagagtagaaccgcctgctatgtcggaacggtttacaaatgtctggtacggaacctctgctctcgcgcaaatttctttaaatactgctgctgatacagcatctgtacaatatttctggtttgcattatatttaatgacaattccgccgttcagaaccggatggttcaccgggtcagactgatctgtataattcggatgaagagcatgagcattgtctgctgagatcataaagctgtctgccaggcacatcaaatattcttcataggtccttcccaggccggaattgatgcgcagcagtgtatccttcagaaatgcagaagctgccccctgtctggttccgcttcccacttcctcattgtcaagaacacaatgtacagcaatgctctcttttttgccgcctgaaagaaagccttccagagatgcaaaagcgcactgaagatcatccagtcttcctgctgaaacaaattcccgttcagccccccatacggttccctgaacccggttgtacagaaacaggtcatgccctaaaatattttcctcactggttcctgctgcctctgcgatcagttttccaaatggctctttggttcctgctgttccatacagaggaagaagatccttctgcggattataggcatatccggaatttacttccctgttcatatgaatggcaaggctggggatcataagaagatttctgtcaatgtctaccagtttttctttcagctctccgttttcccggacaaccactcttcctgccacggaaagaggacggtcaaaccacggagacataagcattcctccgtatttttccacattcagctttacataagccttttccactgtgatctcaggattttctttaatcttaaaagtcggagaatcgctgtgacttgccataatgtgaaagctgtacggcgctttttccggaatggaaaaagcgatcagcgctgaattgtttcttgtaaccatataatttccgccgggggtcaggctccacagttctttttcggaaagctcctgaaagccattgccagccagtgtttttttcattgtatccactgcatgaaaagcagttggactttttctgataaattcaagtaatttctctgctgtttcgtaatacatttctacttacccctttatcttttgactcctttctattatacggtaaaattcacagtaacgcaatgaaaacctggtttcttcaatcgagtaggaggggaaatattatttccccgacctctcacaccaccgtgcgtaccgttcggtacacggcggttcaatcaacttcacaagtaacacacctttcggtgtagtaatctaacattgagactagtccaaatgaggctagtcttttattgcttattgcaatctgtaggtctccgcatcgggcgggtctcgcatagccatgtatatatgctgttttccatgcgctccattgtggcacacctagcttaatcagattctttgctctgttttgtggagttttccaatgtttccaaatgcacatacgaagtctgtatctgatgttaccgtcaagtttctggcagagtttcttcatactacctatcttgaagtagttaatccaacctctgataagctgattaagtttctcaaccttgcagctgtttgttatcagtcactttataacaaaccgatctttcaattttcatgcaaaataaaagaggtcctgatataaaggaatctgacgtatttttcatcagattgttttatcctgagacctcttgtattatcatatggttttgtaaccacgaaataaaaagcagaaacctccccgaccaaagttcgattcctgcttttacccaaacatagcttacgctacatttatgcatacctatgataacagtttatacaggaaactacaaccttatttctcaggatttttacaataaaactattgattctcttgatctgaaccttatttcatgtacctgtggccactccggctgtctcatccgttatggttcttacaaacgcaacgtccagcttactgaccgtgtcctctcactttctgtcgttcgtgtgtactgcaaggcctgcgggcatacccatgcgctgttactttcatccatgatcccttattcactgatccctctgattctgcacgtccgtctgattcatgcttatgagcatgaaatcggattccggaacatactggcagagcagtacctcgtggatgaaaacaacctgaaatccatcatccggaactaccgcttacattggaaacagcggctgctctccatgaggcttcctttccctgatatccccagcctggtctcagcatgcttttccctcttttccagacagttcatgcagattaaatcaacctccaataaacttttttcctgccaacataaccttacacgacaggtcctgttttatcccttatccttaagaaaaaggaggtatataaaacttatgaagcaggaaaaacaacaggaagtcgccctgatgcgctatggtgccatcgcacctatcattgcgggacttgatgaacgttatccaagcaaaaccgcttttttcgcagaaatctctgcaaaaggacttatggggccagatggaactgcggcagacaccaaacagggatatgcgccgctacgaacgcccccatatcaacgaagtctggtgtggggatagcagtgtcggtccccgtcttacgacgcctgatggcaaaaaacaccggatctatatcattgcactgatcgatgatgccagccggttcattaccgggatcgatgtgttctacaatgataactttatcaacctgatgtcggtcatgagatcagccatagcaaagtatgggcgccccaagattttcaactttgataatggaaaatcttataagaacaaacaaatggaactccttgccgcaaggatcggcaccacactcagttactgccagccatacacgccaaccggaaaagccaagattgagcgctggttccggaccatgaaggatcagtggatggcctcccttgatatgcgggatttccattcactggaagaactgaggggaagcctgcatgcttttgtccagagatacaaccaagccccacattcatcccttcgcgggctgtccccactggaccgtttcttttcagagccggaacagatccggagactttcagaggaaagcctccggcaggatttccttctggagattgaacgccgggtatctgctgacagtgtgatcgtcatcgaccagatcgaatacgaagtggattaccgttttgcacggcagcgtatccgccttcgctattccccggatatgaaagagatcttcattgtggaaactgacgggatgctgactccgatccggcttctcaacaaaacggaaaacgcattgataaaaagaaaaaagtacgcttatgcaaaggagacgaatgattatggattacactgcaagatacggaacggattggaattcaatcctttcctgaaaaactcaaaggaagtactcgtggaaacacaagaatacaaatttgctgaataacacacgctctttcctctcatctatctgccacatttactcgtacttccagcaacctttggacttcatcttcttttgcagacttatccttatttccgagcctcatatgtgatttctgtccgtcggaccaagagtttgcctacagcttccacctcacgatggacacccttgctgttcggctatacacttcctcgttgcctaggcgtgttcgggactttcacccattagagcgcgcccatggcgcgcaaacaaaaagctgcaggtcatatacagaccagcagccttctgtttctttaaatctgtgttatacgatggattgcttcctgtgtggtttcgtaggaaccaaatgctgtcaaacgaaaaaagccttctccatgagcgccgaatccggatcctggagtacccactacatgcgcatttctcagaagatgatcaaaaaactcccaggaggacatctgatccggtgttttcagccagatataaggagcattcactcctccggagacggaatatccggcttttttcagttcactgtagatataatgggcatttctcatataatatgccacctgttcccgaagctgtttttttccttcctgagaatacaccgcctctccggctctctgaacaatgtaaggagctccattaaacttggttccatgacgtcgtgcccataacctgtgaagcgacactccatcgcgaaccagttcccggggtatcaccgtaaatccaagacgcacaccggtaaatccggcattttttgaaaagctgcgcagctcaatcgcacaggttcttgccccgttgcattcataaatactgtgagggatatctgtttccgtaatatacgcctcataagctgcatcataaataatcactgcacctgtacggttggcatagtccacccattcctgaagcttttccttggtaatggcagcgccgcttggattgttcggaaaacaaagatagatcagatccggcacttcttccggaatctcgggaaggaatccattggattccagacagggcatatagatcactccgtcaaaattttccttttctttgttataagccccggtccttcccgccatcacattggtgtccacgtaaaccggataaaccggatcacagacagccaccttattatctgccccaaagatctcctggatatttccggaatcgctttttgctccgtcagaaataaatatctcatctgctgaaatgttacatcctctgtctttgtagtcattctttgcaatggcatctctcaaaaattcatagcccagatccggtgcatacccccggaaagtttcctgatgtgccatttcatccactgatctgtgaagactttcaataattgccggggcaagaggctgtgtcacatctccaattccaaggcgaaggattctggcttccggattttccttttgaaaagtggacacttttccggcaattgtggaaaacagataactgcccggcagtttcagatagtttctatttactgttaccatattctatctcctgttcttgtttatttcttccgtaagggcgtcccttaccgcctcagggcttgctgtacccttcaattctctcatcatctgacctacaaaaaaaccgaatactttatccttacctcccagaagctctgaaaaaggacccggattctctgcaagaaccttctgaaccacacgctgcataagatcgtcattctgcacgatccccagaccatgctcccggacaaaaacttccggttctgtatcttcgttaaagatatgctcaaataccttttttgcattggcagggctgaccttcttttcctctaccatacaaatcagccgtgcaaggtgtttcggcgaaaaacaaaccttttccggttctgtaccgtattcttttatcaggcgaagaacttcccccataaaccatgctgctgtccttttgggattctgactgagttctgctgttttttcaaaaagatcagccagatgtgccgattccgtcaaaactctggcatcataatcggaaagtcccatctcatcctgatatatctgctgcttttcttcccgcagctgtggctgcgtattacggattctctgaatccattcatctgaaatatgaaccggcggcagatccggatccggaaaatatcgataatccttagcgtcttcctttgatctcatggcacgagagctttctttattgtcgtcccaccgccttgtctcctgaattaccggccttcccatttcaagaagctcgatctgtctctcccgttcagcttcaatcgctcttgtgatggctttgaaagaattcaggttcttcatctctgttctggttccccagacatcgcttcctgactcacagacagaaaggttgacatctgcacgcatggaaccttcctgaagcttacagtccgaaattccaagatactgcatcatacagcgaagtttatccagatatgcaataacctcctcagcgcttctcatatccggttcggaaacaatctcgatcagaggtactccgcttctattataatctaccagtgaacagtcttcccattcgtcatggatcagtttaccagcatcttcttccatatgtatttcatggatcctgatctttttctttccggctgaggtttcaatctctatccatccatcatgacacaacggcagatagagctgtgatatctgataattctgcggattgtcaggataaaaataatttttccggtcaaatttgcatagttgattgatctgacaatttgccgcaattccggctttcagtgcaaattccaccacctgacggttcagaaccggaagagaaccgggcatcccggcacataccggacaggtatgggtatttggctctccgccaaattccgtagaacagccgcagaaaattttggtttttgtggcaagctctatatgaacctccagtccgatcacggtcttatactgtctcatacctctgtgcctcctttttctgctgatggaaatttcccccgtgcattttcaaatacagccgctgaccggatcagcgtattttctccaaaacaagggccaatcatctgaaatcctacgggcagcccttttctgtcaaagccacccggaagggaaatggcaggaagggcgcagagatttactgctactgtataaatatcacccagatacatggtaagaggatctttcaggctttctcccagctttggagccgtatggggagccgccggagcaagaatcacatcatacttctcaaaggcctggtcaaattcttttttgatcagagcttttgcctttaatgctttcagataataagcgtcataataaccggagctcaaaacaaatgagcccagcatgattctgttttttacctcttttccgaacccctgcgttcttgtttttctgtacatatcatgaagtccctgatattctgccgcacgaaatccatactttacaccgtcaaatctttccagattggagcttgcttctgcacaggcaatgatataatatgccgggattacatattccgtggttttcattgaaaaaaattccacttcagctcccagttcctccaaaagcttcagagaagcaagaaaaaccttgcggactccttcttccattccctctgccatatattcttcaggaacgccaaaccgcattcccttcagatctttccctgaagtcagcccaggtttcggaagttctctcctgagagaagtgctgtcctttggatcatatccggcaattacctgaaggagagcagcacagtcttctgtattttttcccacaggaccaatctgatcaagagaagacgcatatgccaccagaccatatcgggatacggttccataggttggcttgattccggtcactccgcaaaaagcgctgggctgacgaatggaaccgcctgtgtcggatccaagagccatatatgcctctccggccgcaactgccgcacaggaaccccctgatgaaccgcccggtacatgctctgtattccacggatttgccgtaacaccaaaagcagatgtttctgttgtacttcccatggcaaattcgtccatattcgtttttcctatgaggatcattcctgcctgttccagacggtcgatcacctcagcctgatatgtaggaataaaattttccagtattccggatgcacaggttgtctttttacctctgatacagatattatcctttaccgcgatcggtactcctgccaaaggacctgtatagattccctgctcaattcctttctgaacctgctctgccctcttatatgcgtcctcttcataaagatccaagtatgcatgaattttcttttctttttttctgatctggtgaaacacactttctacactgtctgaaacgcagatcttttttcccctgatattacgggacagttccagtgcagtcatctggcttaattccatttatgtcacttcctatcctattgtcttcggcacatgatactggccgtcttttgttcttggcgcattaaacagcatggcagttttctggttttcatttacgatttcatcctcacggaacacattctcactgccaaaaatatgggacataggctctgtaccttctgtatccagctgatccagcttctctacataggtaagcattttctgcatttccgcccgtgcggcctcccgttcttcctcttccagagaaagctttgcaagaaggcagacattttccattgtttcatcatctatgatctttgccatggatattcctcttttctgctttttgattccctgttaacctgaaatatttttcctgtatccggatcagggttccagacggttcatgtctcttggaaacaaacaggcttcacggacattttcctctcccagaagctgcatcgtcagccgttccaggccaatccccaatccgccatgaggcggcataccatgtttaaaagcatccagatactgttccatgccttcttcttccatccctctgtctgcaatcttggcggtaagctgctgataatcatgaatgcgctgtcctccagttgtaacctcaagaccacggaacaaaagatcaaagctcagcgtaaaacgcggatctgccggatcatccattgcataaaacggccgcttttttgacgggtaatgagtgacaaatacaaaatcagaattatattcttccttaaaataccttccgatcagagcttcctcctccggttccagatcgtaaggattgcggacgggcctgttatatttttctgaaacaagttcttttgccttctcaaactgtactgccggaatcctgtctacatttggaagctccagtttcaataaagacagttctttatcataacttttttttaaaagagccatggcatattgaagatatccggtttccatggacatgatttcctgaaagctgtctatatatcccatttccagatccagactggtatattcgtttaagtgacgtttggtattgtgcttttccgcccggaatacaggacctgtttcaaacactctgtcaaatactcccaccatcatctgtttataaaactgcggactttgcgccagaacagccggcttatgaaaataactcagtttaaaaacatttgctccgccctctgctcctctggctcctaattttggggtatggatctctgtaaaaccatgttcataaagataatcccgaaaagctctcacaagagcctcctgaatcctgaatttggaacgttccctgatatttcgaagcgcaacggaacgcatattcagctttgactcaagcgaagtattcagtttccatttgtctatggcaagaggcatagattctaccgggaaagacaatatcttcacacctgtgatcctcagttcccgtccatgaggagcccgctcctcttttttcagaattcctttcacctgtacagtcattgcttctttcagctgatgaactgaacagtccggaattttattttccagaacagtctgaaacagcccctctctttttctcaatattataaaagccacatcgcccatatttcggatgctgtgaacggctccttcaatcactgcttcccggtccagcagggaagtactcataagctcatcccagtccgtactgttttttttccatttcccatccgtatattccatatcctcatcctccattacgtcagtggcttattattttttcatgttactcctcgttattcctcaaaaaacagcatcaggatcatctgggctgtttccaccatgttcgttcctgaatccatactgcatttctgtatatagcgatatgcttcctcctcactgaggtggtttctctgcatcaggatcagttttgcattggaaatataattctgctctttccagcttctgttcttgttttttttcttttctttccttctgcgtcgttcctgctgagtcagcatcatatgaacagtattaatcagatcgcaggtcttgacaggcatttccacacagaggacagaatccggtacctggcatataaaccctgccgatgccagcaggagcatttcaaatccctccggcatacattccttaatctccagatatcctgtatcagaaagccggcgtccacatatcagcacaccatttccaagctccgataaataagaaagagcgcctgatccggaactgctcactgccgccaccgaaaaaccatgccgttccagaaccgcacgcagcttctttgcgtcttcaattttcggtaatgcgatcacaatgctgtccatatgttcctctccttaatccttccaaaacccggattcctttttacgggctacagacggtacaaatactcctcaacctcccagtctgttacctgccgcgtatatctcagccattcttttttcttagactccacataaatcctgcagaaatcctctcccaggatttctctgatccaggaactgttttcaaaaatatcgattgcttctttcaaagtctccggaagacagtccggattctccgtttcccccgctttcagaggaaccagccgttttcgaataccgtccatccctgctgccaggcataccgccagcacaagataaggatttgccgcagcatccgggctcctcagttctaccatggactcctgtcctctgaaaaacgggatccttacaagagatttctgatctgaatctgtccaggtaagttcagtaggcgccccgtatccgggaaccaggcgcttgtaagaattcaccagcggattggtgatcagcgccatttctctgctgtgtgcaagaagacctcctgcaaaataaaatgccgcatcactgattttccccggtgtctccttacactcaaaaatattctgtccgtcttttacaagagaaaatttcagatgcataccggaaccattaaactctgatctgggctttggcataaaagttgcatggagtccatggcgtctggcaactgtacggactgccatcttaaaagtcatgacacagtcggcgatcctgcccgcttccccgtatctgaaatcaatttcatgctgtgccggtgctttttcatggtgggaggattctacctccacccccatatcttccaaagtaagaaccatgtctctccgtgcgttttctccaagatccagaggactcacatccaaatatcctgcctgctcatgactgacagtagtgggaattccattatcgtctgtatgaaacagaaaaaactcacattccggatctgcaaaaaacgtatatccttcttctcctgctttttccagattctgcttcaggatatagcgtgaactgttcttatacggtgtaccgtctgcacagtagaggtcacacagaaatctggccacctttccctgctgaggccgccagggaaggattgcaaacgtatcaagatccgggtaaagaaacatttctgcctcattctccatacattcacctgttatcagtgtccagtctactctgcatctgttatccagtacccgcggaagttctctggatgtcactgcgatatttttaataacaccaaacatatctgtaaactgaaggcggataaattccacatcctcttcttcaaccagctgtaatatttcctttctggaataattccccatgttattctctccttaatcgctaaattaaaaaaggcgcacttccaacagtatccccattgaaagaacgcctttgttcatgcaggtattatagcaatgtgtttttcctttgtcaacaaattcctgaagaagatctcctataaactttcgacaaaattcttcacagaatcagagattggtatatcccatcagagattcatccacagctctggcagcctctcttccttcccggattgcccagacaacaagagactgtcctctgtgcatatctcctgctgcaaatacacggggaaccgtcgtagcatagccgtccggagccgtctccacattggttctttcatttacagctacctgaaaagcatctgtcacatatttctggcttcccagaaatccggctgcgatcagaaccagatcggcagtgatcactttctccgttccctcggccggaatcatgatcatccttcctgttttttcatcccttttactttgcagtccaactgtctttgccttgcaaatattcccttttttgtcggcaataaactctgtaaccgttgtctggtatactcttggatcctttccaaagacagcaatggcctcttcctgtccatagtcggttttcagaactctcggccactgtggccacggattatcagcagctctttcagccggaggcttcggcatcatttccagctgtgtaacagatttggctcccagacggatcactgttcccacacagtcgtttccggtatcgcctccgcctatcacaagaacatgcctgtctctggccatctcatatggtatctttgtaaaatcactgtccagaagagctctggttactgttcccaggaaatctacggcaaaccatattccctttgcgtctcttcccggcactctgatatctctgggagacgaagctccgcaggtcagaagtactctgtcatacgttttcagaagctcctctgctttgacatcttttcccacgtctgtctttactttaaagattacaccttcttcttccatcagacggattctgcggtctactacagatttttccagcttcatatttggaattccataccgcagcagacctccgggacgatcgcttctttcataaacaaccaccgtatgtcctctccggttcagctcctgcgccgctgcaagaccggctggtccgcttcctacgattgcaactgtttttccggtacgaacctttggtttctgaggcttcacccagccttctgcaaatgcggtttcaataatggctctttcgttttctttggttgccaccggctctccgtccagattgcaggtacaggcagcctcacagagagccggacacactctggacgtaaattccggaaagctgtgtgtcttggtcagccttaaataagcctgtttccagttccctgtgtataccagatcatttatctctggcaccagattgtgcagaggacaaccggaagtcattcctgcgatcattgcgcctgactggcagaagggaacgccgcaggccatacagcgtgctccctgcagtctttgtttttcgaggcttaaagggaaacgaaattcatgaaagtccgcaattctcaccttaggagccagtacctttgcattttctcttttatattccaaaaatcctgttggttttcccatagcttcctccttaatgttttactccgatactttcataaaaagcttccatttgtgcctgttcaccggtaagacctttttcttcaagcttggcgcttaaagtaagcatccttttatattcatccggaatcagctttttaaaatgaggaagataatatgcaaagttatccagaatttttttaccaagctctgacccagtcgccttcacatgggcctcgatcagattcctcagctcctgtctgtcatatttattttccacctgttcgatagagatcatcgctttattgatattccggtaaagcatgttctctgtatccagtacataagcgatgccgccgctcatacccgccgcaaagtttttgccggtctttccaagaaccacaacccggcctccggtcatgtattcgcagccgtgctcgcctacaccttctaccacagcgcaggccccggaatttctcactgcaaaccgttctccggccacgccgttgataaaggcggttccgcttgtggcgccgtaaagagccacatttcccacaataatattttcttctgccttatatccggccttttccggaacttttacgatcagcctgccgccggacagccccttgccaaaataatcattgctgtcaccggtaagacaaagcgtcagaccttttgggataaacgctccaaaactttgtccgccggcacctttgcagttgattacaatggaatcatccggaagacctgctgggttctgtctggtaatttctgctcccaggattgttccaaatgtacgatctgtattggtcacttccacgtttaattccgcctttgttccgccggagacagcccgaatacattttttcagaagaattttttcatctaacgttttttccagttcaaaattataaacagccctggaatcaaaggtcaccttctgtgttttgcctgtgtaaggattatccaggatagcgctcaggtctacttttccgatatgcggttcgtcagccctgtccgccgccttgagaagatcacttcttcctaccatctcgtcaacggtacgcacgcccagtctggccatatattcccgcagctcttctgcaataaatttcatgaaattttccacatattcaggttttccccggaaacgcttccgaagctccggattctgtgtagctacacctacaggacaggtatccagattgcagactcgcatcatcacacaacccatggttacaagaggcgctgtggcaaatccaaattcctctgctcctaaaagcgccgcaatggcaacgtcacgtccgctcatgagctttccgtctgtttcaatacgcacccggctgcgaagtccgtttttcagaagtgtctggtgagtttcactaagtcccagttcccatggaagtcccgcattgtgtatggagcttctgggggcagctccagttcctccatcgtatccggagatcagaatagtctgggctcctgccttggccactccggcagctactgttcctactcccgcctctgatacaagttttaccgaaatatccgcaaatttatttgcatttttcagatcatagatcagctgggccagatcttcaatggagtaaatgtcatgatgcggcggaggggagatcagacttactccgggagtggaatggcgggtttttgcaacccatggataaaccttctttgccggaaggtgtccgccctcgcccggttttgccccctgcgccatcttgatctggatttcttttgccgatacaagataacggctggtcacgccaaatcgtccgctggcaacctgtttgatggcagaacagcggtcatccgccgatccggaggaagcaatcctctcctcactttccccgccttcacctgtgttggactttccatgaagatgattcattgcaatagcaagggtctcatgggcttcctgtgaaatggaaccataagacatggcgcctgtcttgaagcgcttcacaatctcctcaacgctttccacctcatccagagggactggattttctgaataaacaaaatccatcagtccccttaaagatccgtgattctccttatctaccagttttgtatactctttaaacatctcatagcttccgcattttgcagactgttggagtaaatgaatggttcttggattatagcgatgctcttctccctgactgcgcattttgtgcgcacccacactgtcaagagtcagatccgtattcagccccagagggtcaaaggcttccgaatggagtttttccacattttcctcaatatcctccagagtaataccgccgatccggcttacggttccggtaaaatacttatcgatcacctctttggagatacctaccgcctcaaagatctgggatccctggtaggactggatcgtggagattcccattttagacgcaatctttacgattccactcagtactgcatgattatagtcttctactgccgcataatagtccttgtccagcatgtgattatcaatcagctcccggatggtttcctgggcaagatacggattgactgcacttgcaccatatcccagaagagcagcaaaatgatgaacctctctgggctctccggattctacgataatagccagagaagtacttttcttggtttttaccagatgctgatgcaccgcggaaactgccagaagagacgggatcgccatatggttctcatctactccccggtctgaaagcaccagaatattggcgccttcccggaataccttgtccacctccacaaaaagacgatccattgcccgctccagtctggtgctcttataatagagagtcgatacaacggcggaccgcaggccttcctgcttcagatttttgatcttcagcatatccgtattggtcaggatcgggtgcaggattttcaggacacgacagttttccggctgctgcaccagaagatttccgtcctttcctgcataaacactggtagatgtaacaatttcctcacggatagcatcaatgggaggatttgtcacctgtgcaaaaagctgtttaaaataatcaaacaaagggcggtgttctctggacagaaccgcaagaggggtatcagctcccatggctccgatgctttccgctccatttaacgccatatttctgatggaagtccggtactgctcataggtatagccgaaagccttctgaagcctcgccctctgctcctctgtatattcctccacacggacattggggattttgatatctttcagacgtaccagattgctgttcagccactctccgtacggctgcgctttggcatatttttctttcagctcattatcgtcgatcaccttgccctgaaccgtatctaccagaaggatttttcccggatggaggcgctccttcagaacaatattttcttccggtaccggaagcacacctacctcagaagaaaggatcatatatccgtcagaagtaatataatatctggaaggacgaagaccgtttctgtcaagaactgcgcccattacatctccatccgaaaacagaatagaagccgggccgtcccagggttccatcattgtcgcatagtactgatagaaatcccttttttcctgggaaattgtatcattgtatgcccagggttccggaatcgtgatcataaccgcaagaggaagctccataccgctcataacaagaaattccagtgtgttgtcaagcatggcggaatcagaaccgtttcggttcaccaccggaagtaccttgtgaagttctcctttcagatagggagattccatgttttcctctcttgccagcatcttgtctgcatttccacggatggtattaatctctccgttatgaacaataaagcggtttggatgtgctctttcccagctgggattggtattggtactgaaccgtgaatggaccattgcaatggcagattcataatccttattctgaagatccgcaaagaaagtccgaagctgccccaccagaaacattcctttatacacaatggtcctgctgctcatggacaccacataggtattatcattgctctgttcaaattcccgacgggcaatataaagcctccggtcaaaactgattccggcttccacatcctggggtttccgtataaatgcctgcatgatacagggcatacattctcttgccttacttcccagaacctccggaaataccggaaccgtcctccagcccagaagcttcagatcttccttttcaagaataatctcaaacatttttttcgcctgtgcacggcggatctcatgctgcggaaaaaacagctgggcaattccatattccctttctccgccaatatcaaatccctcttttttgcatacttttttaaaaaatttatgggaaatctgcagaaggatccctactccgtcaccagtctcgccttctgcatcctttcctgcacgatgttccagatgctctacaatcctcagggcattggcaactgtttcatgtgtttttttgcctttaatatttactactgcaccgataccgcagttatcatgttcaaactcccggcgataaagcccctgttgttcttcctttctcacttctttcataatcctcatcctcctgtatctttaatcagatatcctcatttccttcctgtgtgcactggccgcctccacaaatccccggaaaagaggatgcgcatgatttggtcgtgacttaaattcaggatgtccctgcgttccctgaaaaaacggatgatcttccagttcaatcatttccacgattcttccgtccggagatgttccggcgatcaccattccgttctctgacagttcctgccgatacgcattgctgacctcatagcggtgtctgtggcgttccctgatctcccttgttccaaaaagcgcctctgctctggagccctctgcaagaatacagggataacttcccagccgcagagttcctcccagatcctccactttttcctgatccggcataagcgcgattaccggatgacctgttgaaggagccagttctatactgtttgcatcctcatagcccagtacatgacggacaaattctacaatagccatctgcattcccagacagattcccaggtaggggatcctgtgaacccttgcatactgtgctgccagaatcataccctcggttccccggtttccgaagccgccgggaacaaggatcccgtccgctgtatggagcagctgatccatatttttttcatttaattcctcggaatcaatccatataagctctgtctttgccctgcaggatatcccgccgtgcttcaatgcctccactacacttaaatatgcgtcgtggagctgcgtatattttccaacgatggcaatgttcaccgttgtttccggagcccggagatctgccaccatcgcttcccagtcacgaagatccggctttctgttttccatacgaaggctttccagcactacatctgccagtttctctctttccattgccagaggcgcttcataaagatattccacatccagattctgcagtacatggctgaccggaacattacagaacagggcaattttctgccggatttcttcggtaagaggatattcgcttctgcatatgagaacatccggctggatccccattccctgaagttcctttacacttgcctgggtaggttttgttttcatttctccagatgctttcagatatgggatcagagtaacatggagcaggacagcattttcgtgtcctgtctcctgctgaaactggcggattgcctccagaaaaggctggctttctatatcccctacagttcctcccacctcaatgatggcgattcggtcctcatcctgtttttttgcacggtaaaagcggcttttaatctcatttgtaatatgaggtatcacctgaacggttcctcctccaaaatctccgtgcctttccttctgaagaacagaccagtatatttttccggttgtcacattggaatttttgtccagattttcatcgataaaacgttcgtagtgaccaagatccagatctgtttctgttccgtcttctgtaacaaatacttctccatgctggatagggttcatagttcccggatccatattaatatagggatcaaatttctgcatggtcacctgatatcctctggctttcagaagccttccaagggacgctgctgtgattccctttccaagaccggataccactcctccagtaacaaatacatattttaccatcttcgatttcctcctccagatcataaaaaaagcgtcggaagcctgaaaggggagggtaagccccaaagcttctgacgcctttgtcagatattactgatctgtttaaaatatgttccctactataacctattttttttcgtttgtaaagatatttttaacaaaatttcaagtcagcaaatttcaaaagctccgattcgctcttatcggatctccatgggataatttccgtcaaagcaggctctgcataaaggcagtccccctgccatcccttccagatattccagcttcatatagcccagagaatcggcgccgatcatacggcagatctcctctgtactgtggatggatgcgatcagctgatcgttggaaggaacgtccgtcccaaaataacagggatgaagaaaaggcggagacgagatccttacatgaacttctctggctcctgccttcttcagcatatggatcagattggcaatggtggttcctcttactatggaatcatctaccagaacgatccttttcccttttactgctgattccagtacgctgagtttcatatgtacactggattctctttccttttgcgtaggtttaataaaggttcttcctatatagctgtttttataaaaggcaagaccaaagggaattccagattcctctgagtagccttttgccgccggaatgccggaatccggaacgccggtaaccagatccgcctccaccggataggaccttgcaagagattttccaccccggatacgggcatcataaattccaactccgtccagaacgctgtcaagccgggcaaagtaaatatattcaaatacacaatgtgcagttttttctccggcaagctcacggttggatcgtatcccctcccgggaaatgatcaccatctctcccggctccacatcacggacaaactcagcacctacagaattcagtgcgcagctttcggaagcaagcacatacgtgtgatctctttttccaatacaaagaggcttcagtccataaggatcgcggacaccgataagctttcttggactcatgatcaccagaccgtaagccccctttaattttcgcgctgtttttaaaactgcttcctctacggaatcggaatgaactctttctcttgcaatatgaaaagcgattacctcagaatctgttgtcgtatgaaaaacggccccattctggatcagttcccatttcagttcttttgtgttgatcagatttccattatgggcaagggcaagtgttcccttaatataagacagtacaagaggctgcgcgttttctgccacagaagctccggtagtagaataccgcacatgtccgatccccagatctcctgacattttttccagtgtttcccggcggagcacctcacttaccagccccagatccttatgaaactgaatatttccagcttctccctttgtattggaaactgcaagtccgcaggactcctgtcctctgtgctgcagtgccgtaagaccataataaacagccggtaccacattccctccttccaggtcataaattccaaacacaccacaggcttcttttaattctgccatcttatgtcctcctctctttttcacactgccattatagtgtgataaaattttttgtcaagttttttgtaaaaagttattgacaaccgtaattttttgtgtatactacttcacataagcaaagacgctttgaatcttgaccatcaggatccgaggcgtcttttttattttctgaaacctatacctgaaaggagaaactctttatggaaaaaaatattcccgaactgtatggaagccttgtttttaacgacaggatcatgaggaacaaattacctaaggatatgtacaaggctctgcgcaaaaccatccagaacggcacgcatctggaactggatgttgccaattctgtagctgttgcaatgaaagaatgggccattgaaaacggtgcaacccattatactcactggttccagccaatgaccaattttacagccgaaaaacatgacagttttatttctcctgcaggagacggacagatcattatggatttttccggaaaggaactggtaaaaggagagccggatgcctccagctttccatccggaggacttcgtgcaacttttgaagccagaggctacactgcatgggatccgacttctccggcttttatcaaagaccgtactctttatattccgacggctttctgttcctacagcggagaagctctggacaaaaaaactcctcttctccgttccatggatacgctgaacagagaagccgtgaagattcttcatcttcttggaaataacgagataaagcatatcaataccaccgtaggtccggagcaggaatactttctggtagataagaatctttacaatcagcgaaaagacctgattttctgcggccgtacactgatcggcgctccggcgccaaaaggccaggaaatggaggatcactacttcggaactctgaaaccccgtgtatctgcctatatgcacgatctggatgaagagctgtggaaactgggaatacctgcaaaaaccaaacataacgaagttgctccggcacagcatgaacttgctccggtttttgataccaccaatgttgccgtagaccacaatcagcttacaatggaaatcatgaaaaaggttgctgaccgccacgatctggtatgtctccttcacgaaaagccttttgagggaatcaacggaagcggtaagcacaacaactggtccatgatcaccgacaccggcgtaaatcttctggatcccggcaaaacacctgccgaaaacacacagtttctggtatttctggtagctgttatcaaggccgtggacgactatgcagatctcctccgtatctcagttgccagcgcgggaaatgaccatcgtcttggcgccaacgaggcaccgcctgctgtagtttccatttttcttggggatgagctgaccgacgttctcagggcaattgaaaatgatgaatatttcagcagtcatgattctgtgcagatggatatcggtgccaaggtacttccgcatttcattaaagatacaactgaccgaaaccgtacttctccttttgctttcacaggaaataaatttgagttccgtatgctgggttcctcatcctctgtggcaaaccccaacatcatcctgaatacggcagttgcagaagcacttcatcagttttcagaacagcttaaggaggtccctgctgatagaatggaaacagctgttcacaatcttctgaaagaaacggtgactgagcacaaaagaattatctttaacggaaacggatatacagatgaatggcttaaggaagccgcagaccgcggactttataatctggtttccacaccggatgctctgcctcattttacagatactaaaaataaagagcttctgatctcacataaaatttttacagaacccgaactttattcccgctatgagatcaagcttgaaaactatgtgaaaacacttcacattgaatcctgcactatggcagagatcattcagaaggatctgatcccggctgtctgcacctatatggaacagattgctcacacagccagtctgaagaaggctgtcgttccggatatctctgtctccggcgaagctgaacttctgaaaaaactgacggcactttctgaaaatatgatgacagaactttccgccctgaaatcagataccgcccgggctcaggaaacagcggatcttctggaaagtgccagaatgtaccagaaaacagtcctcacagatatggataaactccgcagctttgcggatgaagcagaaacactgcttcctgaaactgttcttccatatcctgcctatggcaaacttcttttttctgtataaacagaggtaagcattaccaatttcatattcaggtaaatacagaggatatcctgcaagtcagacttgctcaatttgattatcgatttcctcatccattcgtcatatatcataacggatatcctctgttttacatattataaagcttcgtaaaggcgcgagaaaatctgattttcccgcgctttttcgatataaaaaggaaaaggggagatttattatggaattttcagcagtaaacacgatctgggtgctgataggtgccgcgcttgtcttctttatgcaggctggttttgcaatggtagaaacaggttttacccgtgccaaaaatgcaggaaatatcattatgaaaaatctgatggatttctgtattggtacaccgactttctggattatcggattcggtatcatgtttggtacaggaaacggattctttggttccatccacggaattgcatctgaagcgaactatggtaatgcaatgcttccggatggtgtacctttctgggcatttcttatttttcagactgttttctgtgccacttccgccacgatagtttccggcgcaatggcagaacgtactaaattttccgcatactgtgtctacagttttctgatcagccttattgtatatccggtatcaggacactggatctggggcggcggctttatcagccagatgggcttccatgattttgccggctcctgtgcagtacacatggtaggcggtatcgcagcactgatcggtgcagccattctcggaccccgtatcggaaaatattcaaaaagcggaaaatccaaagctattcccggccacaacctgaccgtcggcgcacttggcgttttcattctctggttctgctggtttggctttaacggtgcttccactgtcagtatggaaggcgatgctattgtaagtgccggcaaaatctttgtaaataccaacctttctgcggcagttgccacagtagccgttatgtttatcacctggttccgttacaaaaagcctgatgtttccatgtctctgaacggctctcttgcaggtcttgtggcaattacagcagcctgtgataccgtttctccggcttctgcagcgatcatcggcatcatttccggttttgtagttgtatttggtattgaatttattgataaggttctgaaaattgacgatccggtaggcgcagttggtgtccatgccttaaacggagcctttggtacacttgccgttggtctgttttctgacggaacaggaacaggctggaaaggacttcttaccggaggcggcttccatggtttcggcatacagcttcttggtatgtgcatcaccattggctgggtagcagttactatgactatcatcttccaggcactgaagcatactatgggacttcgtgtttctccggaagaggaaattgcaggtcttgacggaaaagagcatggtcttgccagtgcttatgatggatttgttgttcatgataccatgtcaccggttcctacacctatgggcgtaacaaaagaagcttctgtcccgaattattctgccgcctctgctcctgcagaagccattccggaaattcccgcagagggagttcacaaactgactaaaattgttattatcacccgtcagaataagctggaagatttcatgcatgccatgaatgaaatcggggtcaccggaatcactatcactaatgtgatgggatgtggggtacaaaaaggagctcgaacctattaccgtggtattgaaatggatatgaatcttcttccaaaaattaaaattgaaattgttgtcagtctggttccggttcagacagttctgaaagcagccaaagaagtgcttcataccggacagtacggagacggcaaggtatttatctatgacatcgaaaatgttgtcaagatccgtaccggagaagaaggatatctggcacttcaggatacacagccaatcgaataattatccgtttctttctcaggataagacaaagagactgtggttttcaaacaaccacagtctccttcaatttgggaaatctattgtttttgcagctccgggactgatcagattccggccagtttcagaacttccggaactttggattcccagcctaatgccatgatatgtacaccctggcagtatggtttacattctctgataatacgggcagcgatctcaactccggtaataccggcttttgttttttctttatctgctttcagttcattgatcatatcttccggaacatgaacgcctgcaacattggcattcatgaatcttgccattcccactgatttcggaatgatgataccgatctgaacaggttttccgaactgttttgctttttccataaatttaataaatttttccggctcaaaaacagcctgagtctggaaatagtctgctccggcagctactttacgttccatttttgcaagctgcgcatcaacagagtcgctgcacggagatacaacagcgccttttgcaaatttgggtggctcgcctaccagctggtttccacccagatcaacacctgattccagctgttttaccgcatggatcagagatacggaatccaagtcaaataccggttttgcctgcgggtgatcacccatttttgtatgatcgcctgtgagaagcagaaggttttcgattcccagcattgctgcgcttaaaagatcagactgcagcgcaatacggtttctgtcacggcaggtaagctggaaaataggggtaaggccttcatccttcagagccttacatacgcccagagaaccaagacgcataacagaagactgattatctgttacgtttaccgctgtaatatcgcttaaatatgtttttgcttcctccagcaatccctcaatatgaatccctttcggcggtcctacttctgctgttactgcaaattcaccacgttcaaatgcttcagtaattttcatcgtacattgctcctactctataaattttaaccgttgtcttatttggacacttcatcatccgttgcgaaattacggatctgtgtggggcatttcagcacatccaggcgtccgatctgtgccagacgtctgtaaatgcgctcccagccgcattccatttcgctgtccacttcacattttccatccttgcagccaccgcactgtccattgacaaggctcttggagcaggcagtgataggacagattcctccggttaagttcaaataacattctccgcactggtcgcatttatattccagaggagtcacaccctgaaaacccggcagcggatatgtatcacaggctgcatataccggcttgtcttcaagatattctgcaactgtctgtactcctactccgcaggaaagtaccagaacagcatcagcctcctgaatttcgctcatatgtttttcaagacgcagcttcatgttttccggattacagatatagtcggttgtaataaaacctgtcaacttcccgtcagcagccagctccttgcggagttccatggattctttttccgggaaatgtacttccttacatccctggcagttgatcataaaaactttttttccgtccaccagtgatgcgatagtctcttttgatttcagttcagtaatcagcatatcacttcatctcccttatcgcattttttccggctttgatcttgcttaccaacggaatcttggaggaacagataaattcacaggaacggcactccacgcaatccattacgttcatgtctttcataccctgccagttctgctcatccgcaaattttgcaaaatacagcggtgaaagttccattggacagacgtctacgcagcgtccgcatttaatacactccattggctgagtctggtcagtatcaatggcaatgattccattggatcccttcatcataggaacattgagatcggtaagctcaaatcccatcattggtccgcccattttgatcataacatcgtcatctgtcgttccgccgcagtagtcgatcatttccttcacactggtaccgatcttgacaatatagtttccaggatttttgatcttctctccggttacggtagccacacgctcgatcagcggcattcctgtacggatcgcgtcagaaatcgctttaacggtactgatattgctgacaaccactcctacatctgccggcagcccgcctcttggcacggttcttcccattacacgcttgatcagagttttttctgctccctgcggatatttggtcttagcagtcaccacttcaatattgtcgcagtcagcaagcttctcttccatcagcgcaatggcatccggcttgttgtcctcgatcacaatgatacccttctgagcgtcaacagtcttaagcactgccttcagaccatagataatgtcatctgcaaattccagaagcactctgtggtctgcagtcagaagaggctcacattcgcatccgttcagaagaactgcttcaatcggtttgtttggttttaatttaacagcagtcgggaaaccggcgcctcccatacctacgattcctgcttcacggacaatttcaatgatctcatccggtgtcagatcctcgtatcctttatgtggttttacagattcatgcagagtattttttccatcagattcaatgacaacagccataacctcaccgcccctggtggcatggaggcgcggttctactgcaactacagttccgctgacactggaatgtacaggcgcactgataaaggctgatgcttcaccgatcttctgacctaccttaacggtatcgcccacctgcacaatcggatttgcaggagcgccaagatgctgtgacatggaaataacaactgtcttcggctccggaaatctcttaagagaaagatgctcactgaattctttacgctctgatggatgaacaccgccatagtagcctgcgaatcgttcttcgcggacagcttttacataatcattgatcaccttgaaattggttttggaataatcacgaagctgcaccggctggtttaaaaattcctcaagacgaccctgtttttcaagtcttctgtaaattttttcccatgcgcagtctttgtttccgtctacctcacatttaccgtcctttgcaccgccgcactgtccgttgacaagactcttggaacagtcaacgataggacagattcctcctgtaagattcagatagcactgtgcacaggcatcacagctctttttggtcagagccattccgtgatgtccggtatagttcagagagttgctggcagcatatacaggcttgcctgcaaggtctgcaactgtctgaatacccagtccgcaggagatcacaataacattttttgttccctccggaatgatatcctgtaattttttctcagtctgagttttgttgcacaggaaatcaacctttacactgcccgtaactgtttttccctgttcagcagcaaatttctcaaactcaccacattccggttcttcaatggtttcaaattccttgaaacacttgttacaggcaacaacgaacaaatgatccttatcggccaataattctgccagttcatcgttactttttaacttatacttggtgtagttttccaattgctcaccttccttgtcaaattgatatacaagctttctgcttctctgtttcgctattttttccctctgcatttagaaaaataacaggcagatcactcagctttgcagttagtacactttagtataacacacattagccatattttccattttaattatatatttttcatcacaaatatgcattgtatacaaaaaaactccggtctttttcgcctgattctgcttatgctcccgttttccgacaggcctagtcctctcttttcagccttggaagattccatctgtaatgagccgccagataacggatcagaaataccaccgcagaagcccctaccatggctgccaccgtcccgaagcttctgtacatatacacacatactactgctcccacaatcgaagcgcaggcataaatatgcttgacaaagatataaggtggaactcctgccatcatatctctcagaagtcctcctcctacacccgtaatagttcccacaaataccaggagaaacgtattgtccatatacccgtgacggattcctgtatttacacctaccacagtaaagatcccaagtcctatggtgtccatgatcagcataaaacggtcatagatttccctgaaatggccttccagaagctcttttttcagataaagcacccagaacaccacacaggaggttgcagttgccacaatcgtataaaccggcttctgaaacattcccggaggaatgattcccagaacaatatcgcggatcatacctccgcctacggaagtgactactccaagaacacagacaccaaaaatatccattcttctgcccactcctaccatggcgccggaagctgcaaacgctatggttccaataatttccataataaaagtaatgatttcctgcataatttcatttttctccccattccattgatcttgtttttgtatcagtcatgctgtgccccaagccggttccgtatccttttataataaagaaatcctgccagatctgccaggatccagccaacagggattgcccaccagatagcggacaccccgaactgcggcattggcgcaaataaataagccagagctactcttgttccaagagaaaggactgtcagaatcagcgacatcaccggacgttcaattcccctgtacagtccgtacaataaaaacaggcacccgattccccagtaaaaagcgccttctatatgaagataatgaacgcctgcacagacgatctccggttctgctcctgacagaaaaattctgatgagaggcgctgcaaagatccacaccagaaccgaaacagccacacaaaagcctgcagatactttcacagcaagcccggaagccttccgaatcctgtcgtatctttttgctccgtaattctgagaaataaaaagagaaaacgcatttccaaattcctgggcaggcatgtatgccagagtatcaatctttactgccacagcaaaggcagccatgatcactgtgccaaagctgtttaccagcccctggatcatcaatatgccgaaattcatcacagactgctgggcacaggtcagcatagaatactgaactactctgttcagtgtttcccgttccatgtgcatatgctcttttttcagcctcagaaaaggaactttccagattgtatagccagctatcccgattccggatactgcctgagcaataaccgttgcctcagctgcgcctcccactcccctgttcattcctgccacaaaccagatatcaagaataatgtttaagacagatgaaactgccagaaaccacagaggcaccacagaatttccgattgcccgaagcagacaggaaaaataattatacagaaaagtaaacataattcctgcaaaaataattctgatatatgtatacataagaggataaacctcttttggaatccgcagcaggtgaagaaccggttctgtccatataaatactgccacattcataagaactgtcacagcacctacaaacagaaaagatacccacatactttttttcagttcctgctcatttcctgccccataggcaatggaaaatacagcgccgcttcccatacagagaccgatggtcactgaagtcagaaaagtcatcagcgtataggccgatcctactgccgccagggcttctgctcccagaaatcttccaaccaccatagtatctgcaatattatagacctgctggagcagatttcccagaatcatgggaaccgcaaaaatcagcatggtctttaaaatactgccttctgtcagatttttttccatttttactgctgttttcattaccgtgtttataacctttcaccactgatatggataaaattataagatattctgtacaaaaaagtcaacacaggtcagcccggaaactatatttttctaaatacaggaaaaagataatacaggaaaaatatcaaaaaaattgaatttgtatggtattctgttacttcctatattatacttagattgattttatttaaggagtgttttattttatgcgtcttgcaaaaaaagcagcagcttccctttctgtttactgttagctgctgtgcatgaaataaatcaaacagctccaaggagcctgctatcacaatccggttctgtcccattatattttgcgtactcacagtttatatgggaaaatacaggaacaaaaaacagactgcaattacaggtgaagtttaaagacagggaagtccacaggaatatttgacgcttacgataaaatttaaaataaaggggaaaacaaagatgatattggaaacaaaacgattatatctgcgcgaaatgaatccgtcagattttaattctttatgcaggattttgcaggatgaaaaagcaatgtacgcatatgaaggagcattcagtgatcaagaagttcaggaatggcttgacagacaaatttaccgctatcaaaaatggaactttggtttatgggccgctattctgaaagaaacagataaaatgataggacaatgcggacttacaatgcagcagtggaaagatcaggaagttcttgaaatcggctatctgttcgaaagatcacactggcatcagggatatgccactgaagcggcaaaagcatgtaaacaatacgcatttgaaaaattaaatgccagtgaagtatgctccattatcagagatagcaacacagcctctcaaaatgtgacaatgagaaacggcatggtcatgaaagatcaatggatcaagcactataaaggagttgatatgcctcattaccgatatgtagtttatcgctgataaaacgaaaaaccagaattaccatttccaggtaattctggtttttattagcaggggatgagagaatcgaactcccaccaaaggttttggagacccctatcataccatttgaccaatcccctttgcgattactttatgaattatacattcaaaagaaacaattgtcaatagatgaatacaattttttgcaaaatctttcaataattgaccgggggaaattgaccaggattaaccaagattgaccaataattcagaaaacccatataagacaaattctcatcttatacaggttttcatcattctgattactctgctacaaaattttgcagccatactcctttttttacaagaataaatcctatcagtgatttaataatatctgcagactgaaccagagcaaaaatagctaccactgacagatttgtatatctgcttaaaacaaacgcaaggcttacactgacgcaccacataaatacgctgtcaaataaaaatgtaacaactgtttttcctcctgaccgcaaagtaaaatacgcagcgtgaagaaatgcgctgtttggcataaagattgctgagattatgataaacctgcaggccagctcctttgcctgtgggttagtattataaagctcagggaaaacaggcgccattataagaagtatcagagccactcccatacagcagaatatagaaaaagcaatcattttattgtctgtgtctctcgcctttttcatgtctccggctcccagaagctgtcctaccacaatggcaacagaatcgcccaatgcaataaatacgatgttaaagacattgcttatggtgttggaaatattctgggctgccacaacgtttagtccacgaatagaatagcactgagcaagcacagccactccgcatgcccataaagcttcatttaaaagcagcggcgtaccttttacaaaaatcttccagaccagatttcgcggcaccatcagcgtacggtacagacctttgataaaaggaagcttttctgtgtttctggatgtccagatcagaataataagaacctccacatagcgggaaagcacggttgcaattgccgcaccctgaactcccaattcaggaaatccgaattttccataaatcaaaagatagttaaaaacaagatttacacaaacggccgtaactcctgccttcataggcagaactgtttctccgcattctctcagagtactggaatatacctgccctaacataaagggcggcagaccaagcagcataatataaagatattgctttccatacatcagtgtagatgttatctcctctgcgcttccttccccatgaagataaatacgaatcagagcatcccctgataccagaaatacaagagcagttaccacggtcagaataactgccagccagaatttataacgaaaagtctggcgtacaccttcgtgatccttttgtccaaaatactgtgcagtaaatatccctgcgcctgccagtccgccaaacatacataaattgtatacaaaaatcagctgatttactatagcagctcctgacatctgctcagttccgatccggccaatcataatattgtcaagaagacttacaaaatttgtaataccattttggatcataataggaatagcaatggcaagtaccatcttataaaacgctttatctcctataaattttctccagaatcctgtttttttctgtgtcatttccatgaatttcctcctctcctgtttctatcaatggactttcttccgcataaacgcactgaaactaagaatactatagaaagagaatatattcaagttttttgtaatgaccaaaagaaaaatatccgcaaacacatatctgataataggacttcttctaggttcagataacttttcgtattaatccagcttacaggcagcttaaataagttaaatatatttttaaatagaaaaaaccagtacttctgttcagtactggttaagttgcacattcaaaactacatacatgttgacattagaatcatttttgaccttgcttatgctttctacgactcgcccggtcatctcgtgacttccgtcactcaatgtcatttgcttcgcaaatgctccgtccagtctgtgaacatccctctgtgagtaaactcactccgctctgttcccttcctgtccgtcccgctcgtctcagctttttggtcaagccctcgaccgattagtagcagtcagctccatacgttaccgcacttccacctctgccctatctacctcgtcgtcttcaaggggtcttacttctttcgaatgggatatctcatcttgaggggggcttcacgcttagatgccttcagcgtttatcccttccaggcttggctacccggccgtagacttggcagtctaaccggtacaccagcggcccgtccatcccggtcctctcgtactaaggacagctcctctcagatatcctacgcccacgccggatagggaccgaactgtctcacgacgttctgaacccagctcgcgtaccgctttaatgggcgaacagcccaacccttgggacctactacagccccaggatgcgatgagccgacatcgaggtgccaaaccactccgtcgatgtgaactcttgggagtgataagcctgttatccccagggtagcttttatccgttgagcgatggcattcccacttaataccaccggatcactaagccctactttcgtacctgctccacccgtcggtgtcgcagtcaagctcccttctgcctttgcactctgcgaatggtttccgtccattctgagggaacctttgggcgcctccgataccctttcggaggcgaccgccccagtcaaactccccgcctggcattgtcccaccgccgggtcacggcggatggttagaaacccaatactgcaagggtggtatcccaacagcgactcccacacaactggcgttttgtgttctcagtctcccacctatcctgtacatgcagcaccggatcccagtaccaaactggagtaaagctccatggggtctttccgtcctggcgcaggtaaccagcatcttcactggtacttcaatttcaccggatgcattgtcgagacagcgctcaaatcattacgcctttcgtgcgggtcggaacttacccgacaaggaatttcgctaccttaggaccgttatagttacggccgccgtttactggggcttaaattcaaagcttcgcttgcgctaacctctcctcttaaccttccagcaccgggcaggcgtcagcccatatacctcacctttcggtttcgcatagacctgtgtttttgctaaacagttgcttgagcctattctctgcggccaggtctccctggcaccccttctcccgaagttacggggtcattttgccgagttccttgacaatgcttcttccgccggccttaggattctctcctcatccacctgtgtcggtttacggtacgggtacggtataaactatagcggcttttcttgacgcacagctcacgggcttccctactttctttcggtccgcatcgtgtcttcccattgacacacggatttgccaatgtgtctggtacctcacttgcaccgggctttccattcccggctcccgctttctgcacgtgtccccacagttctgttataccgcagtacaggaatctccacctgttgtccatcggctacgactctcgtcctcgccttaggccccgacttacccagggcagatcagctttaccctggaaaccttggatattcggccataaggattctcaccttattctcgctactcattccggcattctctcttccatgcagtccacagctccttacggtactgcttcgtcccgcatgcaatgctcctctaccaatcatttctgattccttagtttcggtggcgcgtttcagccccggacattttcggcgcaggacctctcgaccagtgagctattacgcactctttgaatggatggctgcttctgagccaacatcctggttgtctttgaaatcccacatccttttccacttaacgcgcactttgggaccttaactgaaggtctgggctctttccctttcgactgcccaacttatctcgtgcagtctgactcccggtaagcaattctgcggcattcggagtttgatattcttcggtaggctttgacgccccctaggaaattcagtgctctacctccgctaatctctaccgaggctagccctaaagctatttcgaggagaaccagctatctccgggttcgattggaatttctcccctatccacacctcatccccacccttttcaacggatgtgggttcggtcctccactgcctcttacggcagcttcaacctggacatggatagatcacccggtttcgggtctgccctcactgactctggccctcttaagacttggtttccctacggctccggtccttaagaccttaaccttgccagtaagcgcaactcgccggaccgttctacaaaaagtacgcggtcgtgcatataaagcacttccacagcttgtagacacagggtttcaggttctctttcactcccctcccggggtccttttcacctttccttcacagtactatgcgctatcggtcactaagtggtatttagccttagggggtggtccccctcacttcccgcagggtttctcgtgtcccgcggtactctggatcctgctcagtctgctctgctttcgcgtacggggctctcaccctctccggccggctttcccaaaaccgttctgctagctttacagaatcttaaatgcagtccgtaaccccagcgtgcacgcacactggtttaggctcctccgcgttcgctcgccgctacttacggaatcgagttttctttcttttcctccgggtacttagatgtttcagttccccgggttcccctccatacgttatggattggcgtatggatacatgaggtttcctcatgtgggtttccccattcagagatctccggatcaatggatatttgctcctccccgaagcttatcgcagcttatcacgtctttcttcggcccttagtgccaaggcatccgccctgtgccctttctgcttgacctttcgctttccatcaccctagcgtaggtgatgcggtctttgattctcattgctgataaataaatttatcgatgtcttcctatcttacgttttacgtttgtatcaaggatctttaatctttttgattaaagttacatgtatgcagttttcaaggtacaatcctgactgatattttatcagtcatttaaaaagaaaatttcttttcttcttaaatcactggtaaaaccagttctatctttatcaggcttccctgtttttctttttttgatctggcggccacctgctctcccacatcgtctccaatgcagtaccatcggccgcttgggtcttaaccgtcgtgttcgggatgggaacgggtgtctcccccaagcgcatcgccaccagaagcagagtacttaatgagtacaagatttatcgccgtacgaatttagtacggactccgttccgaggaacttaataagcccaactgtaaggcagggcgagtttagtgaacggaacttccttgtttccccttaatacctagacagtgaaacacatctctctacttcttcttccttagaaaggaggtgatccagccgcaccttccgatacggctaccttgttacgacttcaccccagtcatccgtcccgccttcggcagctccgtcctttcggttcggtcactgacttcgggcgttactgactcccatggtgtgacgggcggtgtgtacaagacccgggaacgtattcaccgcggcattctgatccgcgattactagcgattccagcttcgtgcagtcgagttgcagactgcagtccgaactgggacgttatttttgggatttgcttaagctcacactctcgcttccctttgtttacgccattgtagcacgtgtgtagcccaaatcataaggggcatgatgatttgacgtcatccccgccttcctccaggttatccctggcagtctcctcagagtgcccggccaaaccgctggctactaaggataggggttgcgctcgttgcgggacttaacccaacatctcacgacacgagctgacgacaaccatgcaccacctgtctccgatgctccgaagagaaggcaccgttacgtgccggtcatcgggatgtcaagacttggtaaggttcttcgcgttgcttcgaattaaaccacatgctccaccgcttgtgcgggtccccgtcaattcctttgagtttcattcttgcgaacgtactccccaggtggaatacttactgcgtttgctgcggcaccgaatggctctgccacccgacacctagtattcatcgtttacggcgtggactaccagggtatctaatcctgtttgctccccacgctttcgagcctcaacgtcagttaccgtccagtaagccgccttcgccactggtgttcctcctaatatctacgcatttcaccgctacactaggaattccgcttacctctccggtactcaagatcaacagtttccaatgcagtccgggggttgagcccccgcctttcacatcagacttgctgctccgtctacgctccctttacacccagtaaatccggataacgcttgccccctacgtattaccgcggctgctggcacgtagttagccggggcttcttagtcaggtaccgtcattttcttccctgctgatagaagtttacataccgagatacttcttccttcacgcggcgtcgctgcatcagggtttcccccattgtgcaatattccccactgctgcctcccgtaggagtctgggccgtgtctcagtcccaatgtggccgtccaccctctcaggccggctatggatcgtcgctttggtaggccgttaccctgccaactggctaatccaacgcgggtccatctcacaccaccggagtttttcacactgagccatgcggccccgtgcgcttatgcggtattagcagtcatttctgactgttatcccccagtgtgaggcaggttacccacgcgttactcacccgtccgccactaggattataacgacttcaaccgaagtctctgtcaaaataatccccgttcgacttgcatgtgttaagcacgccgccagcgttcatcctgagccaggatcaaactctctgtaaaagtgtgtaagcaattcagcaatgcttgcattggcttaattgcatctcaccgattgagccaaaggctcaagaggttgttccactcaagataactactagctatctctcgttttactgttgttggttcatcgaaccgttctcaaataatgaagttcgattcactaaattcgatcttcgcttccgcttgatctcattaagttccttcgaaccgcactcacactaaattcacacttcgcgtttccgcttgtgttcattaagtgttctgtgtgtaaaagaattttcgagaatcgtatgtgtctcactgtttagttatcaaggttctttgttttctgtctctcagacagctcgtttactttatcacatctcttttcatctgtcaagaactttttttcaagtttttttgatgtttttcgaggtgttgtcaggtaattggctctctcgctgacagcttgtttactttaccacactcagaaaggattgtcaacaagttttttgacttttttcaaagtttttcaagttgtttcttcaaaagaatcatttctttgtgacagccagattaatttaccactttttttcgcctctgtcaactgtttttttcaaataatacaaaaaataaaaagatgtgtttcactgtattaccattaagggaaacagaacctttgcaaccttttcaatctgcttctttatagtttccaaacaatttctaagcaaatgacggttttctactttttccttgctgatataagaaacattatcggccgcctcatttcatctttcattcctttcagattcatcatctcctttggaggcttcggttccacaaaatgttccagcatgaatccattttccagtaagctgtttatatacgtagtcatagttctatgatattttgtaaccttctcccccagaaatactgcattcctttccccctcataataataattgtccacaggaaaatgaagaatatttccatcagcattataataccagtcctgtgttccataggaggtgaacacaggatgctccacagaaaaaacaagttctcctccctgtttcagccacatgactatacgtttcattaattgttcgtactctttcacataatgaaatgccaaagaactgatcacaatgtcaaatgtttctgccggaaattccaaatcttccattgcgctgcattgatatgtaatccggtcatcactgtttttccgcttcgctgtttccagcattttatgagagatgtctgttcccaaaacagaacttgctccctgatctgccgcatacttacaatgccacccatatccacagcctaaatccagaacttttttatctttaaaatctggtagaattttctgtaattccgtccactctccggctccctgcagccctttttttgagcgttccatttcactgtatttcataaaaaatttttgttcatcatacttattctctttcacaattttgttcctctctgccaaaaatattataattcctgtaaatgagccaatttaaaaatgttcgcaaaattcttctctatttatttgtaaatccaataagcagactcaagaacgggcaaatacaatcagaaacaattacaaggctattctctattacagtttacatcttaaagtaaaaagtattcagatattattttggctgccataacaggctccaaataatttccaaatacttttacaaagacttgtatatttacttattttccaagtatttcttcacttcatgcagtgacggcagaatacattccgaaagtctttccatttcttctgtaggcttcgcaagatcaggcaccataatcggatgcatccctgctgcctttaccgcacggatcccattataagaatcttctattccataacagttttccggctttacacaaagtcttgcgcaggcttccagataaatgtccggctccggtttgcttctctttaccatatctccgcaaacaatcacgtcaaagtactgtaaaagaccgccttccgaaagctcccgctttactacttcttccctggtagacgtagcaaggcccgttttaataccggaagtctttaaaaactccagtagctcacagactccctgttttttcggaagcctgccatctgctgcctgctcatgaaagagagcagccatttcctttttataaatttcataaggaaaatcctgcccataatgtttctgaaatatttttacggttgcttcatggttggtgcccaagcactgcatgcataccttttccacctccggtattccatatttatccgcaacctgcttccatgtacggatcacaagggtttccgaatcgaagatcacaccgtccatgtcaaaaatcactgcttccagttttatcattttccttcccctcagcctttcatgatgtacctgatggcatcctgtatccattctacataaaccagattcataccttctgttttttccatagaggactggcataccttgggaaggatcactgtggtaaatcccagttttttcgcttccgacacacgctgggcagccatactgactgcccggacttctccgcttaggcccacttccccaaaagcaagaactgaatccggaatcacaatatctttgcagcttgataccactgcaagggaaatccccagatcaatagcaggctctgtcatcttcattcctcctgcgatatttacataggcatcacaggaagccagatgaatccccacttttttctcaagaacagccataagaagattcactctgttaaaatccgttcccactgccgttcttcttggaataccaaaattgctctgacacacaagggcttggatttccacaagaataggccttgttccttccatggagcaggctacaatagaaccggaagtgccgttaggctttccgttcagcataaattccgaaggatttttaacctcctcaagaccggttccccgcatttcaaatacaccgatctcattggtagaaccgaaacggttttttacagcccggaggatccgataagacgcatgacggtcaccttcaaaataaagcactgtatctaccatatgttccagaactcttggacctgctacgtttccttcttttgtcacatgacctacaataaaaatagaaatcccaagtcctttggcgatctgcatcagtatattcgtggattccctgacctgagaaacactgcccggcgcagaactgatatcctcgtgaaacatagtctgaatagagtcaataaccaccatgtccggcttctttctctcaattacttcccggatagtttccagattcgtctcacagaatatctgcagattttcattaaattctccgatccggttggctctgagacggatctgacgcaaagactcctccccggaaatataaagcactgagcttcctgacagagacagatttctgcatacctgcaaaagaagggtggactttccgattcccggatctccacccaccagaacaagagacccgggaacgataccgcccccgagtactctgtcaagctctccaatctttgtcagccgcctttcatcctctgaaatccgtatatcttttagttttacaggctccggtctctgcccctgcgccatagtccggctgccggaagacgacgttttttttgtggaaacagcctcttctacaaaggtgttccaggctttgcagcccgggcactggcccatccatttagaagactcatatccgcattcctgacaaaaataaacaacttttttattttttagcattttttgatcttcacttctgccacagcatcacccagctcagcgctgaaagaaagcttgcctccaagatttgttttcattgtacctgcatctgcgccgttaatggtaatatcgtactctgtgtcagcctccatttctacggtaatctgtgcatcctctgcaccttctacctgaaagctcatggttgaaccgtcctgcaaaagattataaactgcagttcccggtacagattcgtaaacaaacataccgtttctttccagcttggtgatctcatgaaacgtttttactttataaacatccccctgatgctgaaaatctgatactttggatttctgagccagctcataattaccaaagctgatgcttccgttttcctctgtacgaatcagttcttttactactgccatgatcttatgtcctccctgagattctctgttgtattatctttggatatagaataacccttcagaatcatgtatcctgatactgaataatcaggcaaaaggatgcttcgttcctttcctgctgattattcttattataacattttcacaattttttgaacagtatcctaaccaagatttaatatcttttttatatttactttttgtctgctttttctgcaggaacaggaataaaccgaagctgtttctgatgaagctgaacctttaccgtatcgccttttcggattcttccctccagaatttcatttgcaagactgtcctccagctttgtctgtattgcccggcggagaggtcttgctccatacttactgtcaaatcccgcctctgccagataagccctggcagaatcgctgatcttcagccgtatatccatctgctcctcacaccgtttttccagatttttaagaagaagccccacaattttacggatgtgctctttattgagggtatggaataccatgatctcgtcaatacggttcaaaaactccggtttaaacaggcggcgcacttcttccattacatttgatttcatccgctcataatcctgtttctcattatcacctgacataaatccaagtttttttggctcaataatagcctgagctcccgcattggaggtcatgatgatgatggtctgcttaaaatccactttccgtccatgagcgtctgtaatatgtccgtcatccagtacctgaagtaaaatattaaatacatccggatgggctttttcgatttcgtcaaaaaggattacactgtaaggatttctgcgcaccttttcgctgagctgtcctccctcgtcatatcccacatatcccggcggagaaccgatcatttttgagacgctgtgcttttccatgtactccgacatgtctatgcggatcatagcctgctcgcttccgaatacagcctctgcaagcgccttggaaagctctgtttttcctacgcctgtaggtcccagaaacaggaaagacccaatgggacgtccggggtccttcagacctacccgtccgcgtttcaccgcctgggcaactgcttttacagcctcctcctggccgatcacccgtttatggagaatcccctccagatgagccagcctctttgattcactttctgtcagcttctgtacaggtaccttggtccaatcggaaacaatatccgccacggaagcttctgttactgtaagactcttcttctgacttttccgttcttctctggcgcggtattttttaatttcctgttccacttccctctggcggctctgaatctctctggctttttcaaggtctgcctggcggatggcttcctctttctcttccagcagctctttcagcatattttcaaggccatctgtctttgttgctgtccggtagcttttcaggcgcacttttgctgctgcctcgtcgataatatcaatggccttatccggaagaaaacggtcattgatgtaacggacagacatctgcactgccgcctccagagcgctgtcctcaatactaactctgtggtgcttttcatagtaaggacgaagccccttcagaatctccaaagcttccgcctctgaaggttcctctacagttaccggctggaaacgccgttccagagccgcatccttttcaatatatttcctgtattcctccagagtggtagctccgatcagctgaatctctcctctggacagagacggcttcaggatattagatgcatccagggcgccctccgcgcctcctgcgccgataatcgtatgaagttcatcaataaaaagaaggattcctctgtcttcccgcacttcatttactacatttttgatgcgctcttcaaattctcctctgtatttactgcctgctaccattccggaaagatccagcactaccacgcgtttctcttttacagtatccggaaccattccggacacaattttctgggccagaccttctacaatagcagtttttcccactcccggttctccaaccagacatggattattttttgttctgcggctcagaatctggatcagccgtccgatctccctgtctcttcccacaacagggtccagctttccatcagcagccattgctgtaagatcccggctgtactgatcaagaaaaggagttcctgttccttttttatctttcagattcctggatgcctgcatctcctccgcaatagcttcctggtcgcagcccatagcagccagaactgccgcatacagtttctggatattgactcccattgtatacagaagtcttgtggcaacggactctgtttccttcagcatggcaagaagtatatgttcagtgcctgcctgatccgccctccgcatctgagcctcttttccggcattgtcaagaagcctctgagcccttggactgtactccggcactctttccatggtcagaacttccgaaggagcgatcagattcccgatcagctcctgaagcctttcctgctccacaccgaattcttccagaattcttcccgcagtcccctccttttcctttaaaagtcccaccagaatatgttctgtgcctatatacgtatgcttacaggactgtaccgtgcttctggcaagctttagagcatttacagcctgtctggtaaacttttcctgcataaattcctcctcgtttctgatcctttacagatcgtaatcgtcaaaaatctcatcaatcagctgatgtacttcctgtctggaaacctccttgcagcagccctttgccagcgctaccacaagattctgtttcatttcctccagagcttttatcttatctacatcaatggccaccacagcacctcttcttctgtcaatggacacaaacccctcctgtttcagaagtgtataggctttattgactgtatgcatattaatgcctatggtatctgccatctgtctcacagaaggcagagtatctccctcctgaagtcttgatgtagcgatcccaaggatgatctggttcatcagctgaacatagatggcctcgtcactgttaaaatctatttctatgaccatattcaagcctcctcgtatcgtgttacacatatactagcacatctcgcatattttgaaaacagttattttccgtgtcttttccacagttgaaaagaggcagcctcacagccgcctctttctgtattacatttaaccgatgatcttttttaactgttctctgtttaaaatcagattaaatcccattggattgataacaagcgcctccgcctgctggatcataatatcagcaagcttcacaaaaggtatttttgcaatcctcagctttttgcctctggcaaatttttcgtattccagcacatctgaaaaaacaggctgaagaatttttccttctttatttttcagatacggaatatttacctttgccggatcctcctcactgcggtccatggcaacaaggaattctgattttctcagatttgcgatcagctcttcttccagttcccggatatttttgtgttcctccggttttaccggacggcgcagctcctgcataaaataaataccggaaagctgaagcgttgcgttgatcagaggtcttttttccggctcgaccttgctgagatccggctgacgcacaattttgtcaagatccacttcaatctcttcacttccgttattccacaccagggaatttacaccaacagcgtaaagaaggccgtacattctcgggaaatcctttttctcatatttcattcccataagcagtattttatcatccagcttctttttgccaaactccttcagtgtctcttcctcggcaaaaaaccatgcctgatcattataagtctcttctgcgcaggtcacataaggaagctttgtcacctgagaatatgccacaaagatgctgtctctggcctgaatttccttcactgcgtctactacactcattcccattcttgttgtcctttccattgtctgtctccggccccgggggcacagaggaacagatactcctttttatttcatcaggaattctacgattccgtcaagttcctccatctgatccctcttcagagaagatttcacagtaagagtattgtcataaatctccatgtttttcatggaagaaagaatctctttcatctgttttcctgcagaaattgcccaggtaccgttttcgatcacagccactttacggttctggaaattatgcgctttcaattctgaaagaagggtttccattttcgggaaaagtcctgcattgtaagtagggcaggcaaatacgatcctgtcacaacggaatgcttctgccagaatataggacggatctgttttggacacatcatacattgcaatgttcttttctcctgcatcagaaatcttcccggccagaacattcactgcgctctctgtatttccgtaaatagaagcatacacaataagaaccgcatgatcctccggtgtgtaggtgctccatttctgatatttatcaataaaccagcccagattttctctccataccgggccgtgaagcgggcagatcatttcaatatcaagagctgctgcttttttcagggcagactgaacctgagctccgtatttacctacaatgttagtaagatatcttctggcttcttccagccactctgcctcaaagttcagctcgtctgcaaaaatatttccgttcagcgcgccaaaggttccaaaggcgtctgcactgtaaagaactttatcataagcatcataagttaccatagcctccggccagtgaaccattgggatcatggcaaatgcaagggtgtgttttcctgtggaaatggtatctccctctttgatcacaactgcacggttatctacgtcaaaatcaaaaaactgtttcatcatggtaaatgtctttgcatttcccacaaatttcacttccggataacgaatcacaacttctgcaagagaagcgcagtgatccggctccatgtgattcacaataatataatccagagtacggccgtccagtacatgctccaaattctcaaggaactgtgagcacacagaatgatctactgtatcaagaagaacggttttttcatccaggatcacataggaattataggaaactccttttgggatcggatatacgttctcaaacagctccagtcttctgtcgctggcgccgatccagtacatatcctctgttatcttttttacacaatacacgttgtttcctccttacgcctcatcaatggcttttccaatatcatggcgcatatatttgttggcaaactgaatccattcggtcgcctcatatgcgttctttcttgcttccttcaggtctttacccttggcagtaattcccacaacacgtcctccgtttgtgacgatctgaccgttttccagctttgttcccgcatggaagcaataatatccttctttgtcctcaaacttctcaaatccggacataggaatgcctttttcgtattttaccggatagccttcgctggcaagaaccacgcagactgccgcattatcctcaaattcaagttctgtctgatccagagtcccgtttacacaggcctccattacctcaaggatatctgttttcattctaggcagcactacctgtgcttccggatcaccgaaacgggcattatattccagaaccttgggtccgtccggagtcagcatcaggccaaagaaaataattcccacaaaaggacgtccctcagccgccatagcatctactgtcggctgataaatatatttccggcagaattcatctacctcttccgtataaaacggacttggagaaaaggtccccattccgcctgtattcagtccctggtctccgtccatggcgcgtttgtgatcctgagcggaagtcatggtacggatggtctttccatcaacaaaagaaagcacagagacttctcttcctgtcataaattcttcaatgaccatagtatttccggcgcttccgaactttttgtcctccatgatctcctttactccggcttccgcctcagcgagatcattgcagatcagaacgccctttccaagagcaagtccgtccgccttgagaacaacagggaatttcgcctgtgtacgaagatattccagagccttttcagaatcctcaaaattctcatatccggcagtgggaatattatattttttcataagatccttggaaaacgccttggagccttccagaatagccgcatttttacgtgggccaaacaccttcagaccgcgctcttcaaatacgtctacaacgcctcctaccagcgggtcatccattccaatgatcgtcagatctatgctatgttcctgggcaaaatccgccagtttctcaaattccatagctccgatatttacgcactctgcatactgggaaattcccgcattgccgggtgcgcagtaaattttgtcagctttcgggctttttgccacgctccatgcaattgcatgttctcttccgccgcttcctacaatcagtatattcatcaggtatttcctccttatctgctgatctgaacctttccgtcctgaacactgacctttccatttgcaatcaggtcaatagcttccggaaggatcttccattctgcctcttccattacccggcgctgaagtacttccggagtatctccctgctgtacctcaacggccttctgaaggatgatcggacctgtatctgtgcctgtatctacaaaatgcacagtggctccggttatttttacgcctctgttcagaactccctcatgaacgcgcactccataaaaccctgttccgcagaaagacgggatcagagaaggatggatattaatgatacggtttggatatgcctccacgatcattggaggaaccgcaaccagataacctgcaagaaccacaagatctacctgttttttctgaagctccgccagaagagctttatggaattcctctctgttgtcatagcatttcggagaaatacaaacagccgggatcccccggtcctctgctcttttcagagcataggcaccggagttgttgctaatcactactgaaacagcggcattggtgatcactccctgatccagcgcatccagaatggcctgaagattcgtgccccctccggataccagaatgccaagtcttaacataaatccacacccttttcgccggcttcaatacgtcctaccacatatggagtatctcctgctttgcggattgcttccattgttttgtccacgtcttccggttttactgcaagaaccattccaagacccatgttgtaggtattgtacatcattttttcttcaatgtttcctttttctgcaagaagcttaaagataggaagaaccggatagctgtctttttcgatcactgctcttgtaccctctttcagcatacgcggaacattttcgtagaaaccgccgcctgtgatatggctgcatgcatggatgcgcacgcccgcttctttcacgctcttcagagcttttacataaattctggtcggggcaagaagagcctcgcccaaagttgttcccagttcatcataataagtgtccagagactctcttgtcatatcgaataccttacgcaccagagaaaatccattgctgtgaacacctgtggacgccataccgatcagaacgtcaccggcttccagctcttcccctgtaagaagatcttttttatcgatcacgcctactgcgaatcccgcaaggtcatactcatcctcctgcataagtcccggatgctcggctgtttctccgccgatcagagctgctccggactgtgcacagccttctgccacaccgcctacgatctctgcgatcttttccggataattcttgccgcatgcaatataatccaggaaaaacagaggctctgcccctgcgcaggcaatatcgttgacgcacattgccactgcatcgattccaatggtgtcatgcttgtccataaccatggcaagctttacctttgttccgcatccgtctgttccggaaacaagagtaggctcctccatatctttaaatgcactcatggaaaacgctcctgaaaatccgccgattccgcctaaaacctcgggtctcattgtttttgcaatgtgctttttcatcagctccactgacttatagcctgcttctatatcaacacctgcgttcttgtaatccataatatcctcccagtatttacttttattttttattaataattctgatagcctacttcctgcagtcttgcgtccttggcttctacctgctctttcagctcctggctgtattctttcaatttcgcaagaagctcaggatctgaggttgccagaatttttgctgccagaagtcctgcatttgcgccgccattgatggcaaccgtggcaaccgggattccggacggcatctgtacgatggaataaagagagtcacgtcctcccagagaggtagtatgcatcggaataccgattaccggcatggggaaaatcgccgcgcacattcccggcagatgagctgccattcccgcacctgcaataatcaccttaaatcctctttcctctgcactctttgcatagtcaaaaaatacatccggttctctgtgcgcggagatgatcttcatctcatactccactcccagcttgtcaagaattgccgctgctttgctcataaccggcatgtctgaatcgcttcccattacaattccaacttttttcattggtaggcctccttaattttcaatctgttccaggttgattctactaagattctatttttgtgtcaataaaattccataaaagaaatattttggcaaacaaactgtttttgtatatttcggaatttcttccttccgcattctctttatttctcaaaagggcggttcagttcctctgtaccaggaagtacaaaacgtcctttttcaataatggaacgtccttctccctcatcatcgatcacgcggatacttccaagctcttcgtaaggaatggtaatatctgtatggcatccatagtacgcaaggctgatatcctcttttctgaggctggatatttcattgtctctggcaatgatctctctcccgtccggattatatactgcaatatcctcagcccagctgtaacaggtatcgcccactgcaaaatgaggacccattttttctgcgatcagaatgggcagcttgtctgcgatcccgtatttttctgcagccacataggctgtggtatttgttccgatggcaaactctcccattggaagcttcacatgatggtgaaggatattatcctcaatataagcgcggttttccccttccgtctcaaagttactgcaggaataatcgatcacctgaccgcagtcaaatacaagcttcagatccttaaactgcagtccgttcagatacactttttttacatggaggactccgcctgtgcctgccagaaccggagaagtaaacacctctcctaccgggatattcacatctgccacacagttttcaaagtttgtctgttttttgatatcctccagtgtatgaagatgaatgataagatctgtttcattgccgttctgtcctttgatctccacccactcgcaggtatccagagtttcaatgatcgtctgctggattttttcataaagcttatagtccagtgtattgatctttacgatctcatcaaaaatctccgggaagtttcctccgatctccggcaccggataggcgataatggtaaagcttctctcatctcctttgatatagcggttgacaatctgaccggattcattgtcaagctccacctgaagcttctgctgagcttcgcttaagctcagggcttccggcttggacaccggcgaaaaaggttcctctccaaaggtttcaatacatgcaggaccgccgtggacttctgccagatctctgtacttgtcgtaagcgttctgcatggagcggagtttcctttttacaaagtcgctgtcaaggaacagagcgcagtcctgtctgtggtcataatcatactgagggttggcgtttccgcccatatatcctacacgggatgcccctcttttattgatcacatgagccgcatgacgatagatcacaggctccagtcccatttcacggaactgaaggactgccgcccgcaccatccgttcaaatcccagattatagcggatatttacggttttcttttttgtaaggtcttttcttgtattaataaatccgatgcgatatccttctgtataggtacgcgccatatcatcaattttttcctgagaaagactgttcaggaaaagagccacaccggtctcatttccggatacgtattcgccatagcggtaaagatagctcagatcctcaagatctgactccataatgatctttgtggcaaaatccagctccggatcaacgccctctgcaattctctgttccatcatatcctggcagtagtcatttacataagagcgtaggatatcttctactgttttgggcgcagggagttcctcttcgcagaaagcagaatgaatctccagaaacagctccgcgcacacaagataatcccaccattttttttcatatgcatagactatagtgcctctcagctccgcatacaaaaagcagaagctctgtccgtattcccccagcttttctgctgcataagcaggatttccataggaggtcttatagttttccggaaaaagctcttcatacaaagccgtattttccgctttcagctcttccagagaaagctcttcctgttctcttttcaggatttttcctgtttttcccagaaactctgctgttttctgaaaaaattctccaaagggctctttgatttccttttctgtacagatttctgcaatccgttcttcagcaagggcaaaccgttccatcagtaattcgtccaaactgtcatctcctttcaaaaaatcttctccatctttattcatcaatcacatttcccagacggatatgcttgtctaccagtttcttcatatactcccagatttccccggaaccctctgaagtatgctgattccttttgtaaatctggctttttttcacgccgtgctccgcccagcttcttcctccggaagcatcgtttaaaagaagcggctgacagttatcaagcacatgggcaaattttgcctccggtgtctcatatgcttcaaactcttcccaaagctgccggaaccagcttctctgatcctccggaagcagtccaaagatccgttccgcagccttcctctctctgatctccttggttgccgctccggcctcgtcataggcataggtatctcctgcgtcaatttccacaagatcatggatcagcaccatgggaatcaccttttccaggcttacctcttcattggaatattccttcagaagaaccgccataagggcaagatgccaggaatgttccgcatcattttctttacgattcccgtctgcaagatatgtctgccgaaaaatattttttactttgtccacttctataataaactgcatctgtttctctaaacgttccattttttacactcccattaaaaaaaagcccagccatcccaccataatgatcccattcagaatagaaccaacaacactggtacgatgcatacgcttttcctctgaaaaactcaatagtcccaaaatgaacccgtaggcagaaagcatagttgcaaaaaggcagatacctcccacaataaatccataagcgccgtcaagtgcaaaagcagtcagaactgctacaagaaacaaaataagggaagcagctgccaaccctactgacagcttccccttttctgcttcttttgtttttacaaatgaatatctatatcttttcgccataatgccttctcctcaggtaattacagactgcaaacagcacatatcctgctgccgcgcctgcagtatttaaaatcagatcatccacatcaaagcagcccactcttgttacaagctgaatcgtttccacacacagactcagactgaacccggacagaacgatcaggaatccgctgcgccatctccggctgatgaccggcaggataaatcccaggggaatgaatccgatcacattcccgaaaatattcataaaaaaagcagacaagccaacctgttcccggtacatccagaatctccggatctccacaaagggtttcaggttgtatctgtatatgcgctcctcctccgcaatccgtccgtatccctcagaaaaaaacagaaagtagatcagaagcagcacatacagcacaaaaagaaccattcctatctgccggattttttgttttgccctgttactcacagctcaccgtcagatcagaatatctgactttctctttaaaagtctcgctccgctgatgatcataaggataccggctgcggcgcctgtcaccagggtaacaatgcctaccgccagactgcaggcccctgttcttgtcattgttttataaatcttttcgttcacggcgaacctcctatttcactccgtactgacgataatagtcatcaatggctgccttcagagtatcatcgatgatcacctgtccatttacctctttgttgtaaagatactctgtcacctctgccatgtccacaatagccgcagtgtcaaagccgtacagatccttcacttcatcaagagcgcatttttctccgccctttcctacttccatacggttcagagaaaccataagaccaacgatctccacgtctgccgctccttttaccttaggcacagtctcctccatggattttccggaagtggttacgtcctcgatcataacaactctgtctccgtccttcagagtacttccaagaaagcttcctttatctgcgccgtggtctttttcttcttttcggtcagagcagtagcgtacttcttttccataaagctcgctgtaggcaatcgctgtcacaacgcttaacgggattcctttgtatgcaggtccgaataatacgtcgaaatcgtctccatatttgtcatgaatggctcttgcatagtattcgcccagtttctttaactgagatcctgttacatatccccctgcattcataaaaaatggggattttcttccgcttttcagtgtaaattcaccgaatttcagaaccttgctgtctaccatgaactgaataaattcctgtttatactgttccatatttttcaacctccgtatttacgggcaagcccttttcattttttccataatatatctgttttattttagcatatctgctgttttttttcaatcaatggatgaaaggggcgccacagtctgttttttatattttttcattatataataatagtatgggatcagaggaatcagggcagcgatccatgctgccggatctgccatacagattcctgcaaagctggtttttcctgcaacaagaagaacgatagcagttctggcaaccagttcaaaaattccgccaagcataggaaccaacccataacccattccctgaagagcatttcggaaaaggaaaattgtacagaggaacgggtaagcccagaatacagtgcggaaataggttaccgaaacctctaccaccgctgtctctgaaggatcaataaacagataggtaaaatatctgccgccaaaatacattacaaccatctcaatagcagcccatataagaagcatgatccaggaacatttcacacctgcctgtacacggtccatgcggcctgcaccccggttctgtcccacataggtcgcaatggttgctcctatggaaacagctaccatggtaataatattctgaatctttcctgcagcagaaaatcccgccatataaacagcgccgtaaacattcactgctccctgtacaataatagttccaatggctgtaatggaaaactgcagggccatgggaatacccagattcagaagcttggcaaagctccccctgcgaagcgcaaagtttttcttttccagatgaaggatcggatacttctttataatgtaaaccatgcagcatactgctgaaaccgcctgagcgataactgtagcataagcgcagccttccacacccattcccaggaacttgataaataccacgtccagcaccacattgatagctgctgaaatgatcaggaaataaagcggagattttgaatctcccagtgcgcgcaggaaagctgccagagcattataggctgcggtgacaatcagtcccgcatagatgatccccatatacgcctttacatctcccatcagctcctccggagaattcatcaggcgaaggatcggctcattaaacgcaagaagccccacagtcatcactgcagtgatcccaaacatcaggtacacagacattgccacataatggcgcatatcatcgtatttctttgccccgaacatctgagaaacaataatggcaaaaccgctgctcattccattgagccatccagttacaaaaaacatcagagaaccggtgcttccaatggctgccagagcatctacgccgataaactgaccggcaacaatagagtctgcaatattataaaactgctgaaacacattgccaaggaacattggtatcataaaccagatgatcagcttcaccgggttccctactgtcatatcgcttgtcatatcttttttcataatttctccctaaaaaaaggtccgctgtaaatatatacccggaacatttccggatatgctttacagcagcccttatcaaaaaactattttaccgcgccgatcagctgacagatatcctctgtcttctgggatttcatatagtcctcaattccccggactacttcttccgcagcataaggattaaagaaatttgcagttcccacagacactgcacttgcacctgcaagaataaattccagcgcatcctctgcagtggagattccgcccattccaataatgggaagcttcactgcctgagctacctggtataccatgcggacagccacaggttttacagccgggcctgacattccgccggttttatttgccagagcaaatgtttttttatagatatcgatcttcattcctgtcagagtattgataagagaaagaatatctgcgcctccggcctccgctgcttttgccatttccgtgatgtctgtcacattagggctgagcttcatgatgatcggctgctttgcatattttttaacttcttttgtaatggcttccagagcctttggatcctgtccgaaagcaattccgccttcttttacgtttgggcaggatacattgatctccagaagatctaccggttcatttcccagacgctctactacttcacagtagtcttctgtgctttttccgcacacatttacaatgatctttgtgtcatattttttaaggaacggaatatccctttcacagaatacatcaattcccggattctgaaggccaatggcattcagcataccggaggctgtttctgccacacgaggcgtgggatttcccggccacggtacgtttgccactccttttgttactacagcgcccagtttattcagatctataaattcgctgtactccgctcctgagccgaaagtcccggaggctgtcataacaggattcttcagttctactcctgccagtgtaacggctgtctttatcatagctccacctccgtgctcaaaaatacaggaccgtctttgcagatacgtttattgtgtacatgggaatggctgtcgatctcctttgatttgcacacacaggcaagacaggccccaacgccgcaggccatacgttcttccatagaaatccagcatggaatatttttttcctccgcataggctttgattgcccgaagcataggtgtgggtccgcaggcaaaaatcacatctgcttccagagcattctctctgatggcatccataacatttccctttgtgccggtgcttccgtcttcagtggcaacacagacatctgcatacgcctgaaactcatcattcagaaacagctcatctctgtaaccgaggatcgctgttttctgtccgttcagctcttttgcagtctgaagcataggaggaataccaattcctccgcccatgagaaatacacgttttccctctgcttcatgaagaggaaaaccatttcccagcggtcccagaacctctaccggaacgcctgcatggagtctggaaaaggcctctgttcctgtgttctttcctgttacccgataaacaagacggattcttccgttttctctgtcaatttcacagatactgatggggcggggaagcagcttgcttccatcccgcgtataaagtgaaagaaactggcccggcttcgcctccgcagccatatggtctgcctggagccacatgctgtaaatatctttcccgattctttcctggcttacaatctttaagctttcttttgtctttttgctcatctctttcctcctgaatcagttcgtcctgattatttgcggccttccagagctccgctgatatcagcgatcatatcttttaccgcctgtctggatgcgtctgcaaagttcttttcaccaaattctgcgtaagcttcctgtttataagccgcaataattcctcttgaggagtttacaatggcacccaggccgtcctcattaaagaaatgaaccagatcttttcctctgccgccctgagcgccgtagcccggcacaaggataaaggttttcggcataagtttacggagaacttttcccatttccggataggttgcgcctacaacagctcccacatagctgtatccattgcccatatgatcctcgccccactgagcaaccttttcacctacccactcatagagaggacgtccgtcgatcagacgatcctggaactctccactggaaggatttgatgtttttacaagaataaaaagacctttgttttcttctttacatacgtcaataaacggttttacgccgtcagatccgagatacggattcacggttgcaaaatcctcatcaaagccggcatagcttttggagcccacctgaacatgtcccagatgtcccactgcgtatgctgcagaagtagagccgatatctcctcttttaatatctccgatcactacaagatctttttccttacaatagtctactgtttttttatacgcctgaagtcccgggatcccgaactgctcatacatggcgatctgaggttttactgccgggatcagatcacaggtagaatccacaatcgccttattaaactgccagattgcctccgcagcgccctccagtgtctcgccaaattctgcaaatgcattatcctggatatgctttgggatgtaattcagcatcggatccagccccactacgataggagcatttgtttttttaattttttcaaccagtttattaatcataaaaatttcctcctgaaatttatttttacatacttaaacatatcatacacgaaaccagagatttaataaagtattttttgcctgtttttcatatttatgatgtgggtgtcaaaagtacaccaacatctgattttagttccttggcaactgaataaagctatgttttattgtcgatttctggtaaaatataagcataaaatatattttacgaggtacagacaatgtcttttgttttaaataattaccagcagatttctctctttgattcactcggatttttatctgaacgcaaacaaaaaatactggataaatcatgggcaaaaccgttttcagaacatattttttctaatatcgatgagatgatgtttgcgcctctttacagtgataagaaaaattcccgtccaaatgctccggttaatgttatcgtaggggcactcattcttaaagaactgaatggtcttaccgatgatgaactccttgaggaatgtgagtttgattttagataccagtatgcgctgcatactaccagttatgaaaaccagcctttgagtgaccgtacgttcagcagatttcgcgagagaaacgccgcatacgaactggttactggaagggatcttattcacgactgtatcgtttctcttgcggaaaacattcgaaaatatatggatattgctccgataatcaagcggatggacagtatgatgattgagtccaacatccgtcagatggggcgtttggaacttttatatacttgtctcgcaaacctcgttcgtgaaatagcacgcaatggacaaacggagcttcttgaaggactgaacgattatgaagacccgaataacagaaaccgcatagtttaccatgatcagtccacaccacagaatgaaaaaatccaaaaggtcattaacgatgccatttccctgctgcctaaatgtaaggatgagtatggtcagacggatgattatcagcttttgcagagggccatcgatgaacagaccaaaaatgatgataaaggcaaccggattccaaaggccaaggaagacgggatgactcctgatattttgcaaaatccatcagatccggatgcaacctacagaagcaaggcaggcaaaccccacaaaggctattctgcaaaccttgttgaagctgtagatgaaaaaggatctgtaatcgttgattaccagtatgacgttaacacaagaagcgatgcttcatttatcaaagaatatctggaaaacgctgaagtttcagaagaaacatctgccctcattacggacggtgcatatgccagcgaagaaacttccaggctggctgccgataaaaacatggaccttttaactacaggacttcttgggcgcaaacccaaagagatactgggacagtttgagcttgatgaaactggacataaaataaccagctgtccggcaggcaacgttcctaaaagcggttcttatataaaacaaacagattccatacgagtatctttctataaacatcagtgcgaaggctgcccttaccaaagcaaatgtaatcctaatgtaaaagaaaggacagccagcctgattattccactaaaatcaagaagacggattctggagtctacagaactaatgaatgatgaaatccgaacattcataggacgaattcgcaatggagtggaaacagttccatctatactcagaaataaatacacggtggacaaaatgccggtaagaggaaagctgaagacaaagcagttctttggctttaaagttgctgccctaaatttcagtaaattaatacgttttactaaaggcaagttaagatgcagaagctttgagctggcgtaaagggataaatccccttcttatcatgatgcatcattgaaaaacatagttttattcagttgtcaaagaacaaaagtaactgtatgcgtgccaaaagccattgaacaatcgacttttgacacctacatcatatttataaaatacatttattttctcactgtctcccttgtgtcagtttttttacaatccttaagaataatcttgacaatttaaaatatgagctatataatcataaccaagtccactacattattaatataaaatcactagtttttagagattatatattacatgatatagtctgtaaaatctggtgatttttttcgtcagatggacttttaactttttatttttatggaggtaacatcatgaacaaggggactgtaaaatggttcaacgcagaaaaaggatacggcttcatcacaggtgaagatggcgctgatgtatttgtacacttttctgcaatcaacggcgaaggattcaaatctcttgatgagggacaggccgtaacttatgatctgacagaaggcgctcgcggaatgcaggcagctaatgttacaaaattataataagttattatctgttcatatcggatagcattcgtattgatcacaaaaatccccggcatataccggggatttttcttatttgcttattctgttgtttctgctgaaagtccggctacatagctgtccagagcagatgtgtccatagtagtctgtgttacaacagaatcctgtttctgttctattttgtcgtaaacagaatatccgatccatgcaacaagagccacacagacaactacgcccacaattctttccagccagtcataaaacttttcttttttctgttctttgctgtgaccgttttttcttgctttatactgatccacttttttctggctcataactgaatctcctttactgtaaataggctgctgttcattgctgcagcagctgaatatagagataattatagcacgtcatctacattcatgcaatgcttttaaacagccacgatcactccgccgttattggcatacatactgctgacacctgctgtatccagaacaatgatctctttggttgtaagcctttcctgaagggcgtcctttaaaagcattgcgcgctctctgcagttgcagtgggaaatcgccagaacctttgtctcactgttttctgtcttttcagcaacatgctgaaccatttttataagagctttattgattcctcttgcctgatcaagctgacagatagttccctcatctgtagatcccataaccggtttgatcttcagggcgcttgcaacaagagattttactctgctgagacgtccgttcttgcgaagggtctccagatcatccagaacaaaaaatgtgttctgttctgctatatatttctcaaccctttccacggtttcccgaaaagaacagcctgcttcctcacattcctggatcttcattccgatcaacgtttctcctacagaagctgaccgggaattaaatacataaacatttcttcccggattctcctccagaaacagatcttttccaatcactgcactgttataggaaccgctcagttctgaggataaagtcaccgcgtaaatatgatccgcctcacattcatatgccttcatatagcgttccggagacggacatgccgatttcgggcattccgggcaggcagctacttttttcaaaaactcagcctgatcaaaagtttcatcatctatcaccgtctccccgcctacattcaatgtcagcggaacagattcaaaacgttcatcatctttccattcgtcaaggaattctccgcaactgtctataataattttataactcaattatatcgtcctcttttccattatatgtagtatcgaataccacgtttatattaccatatcacctgacatttgaaaagactttttctaaaaactctgttctttttttcatttctgttttataataaaaaaaaatcaagggagcctgaatatgcttgcactgaaaatcaacgatgtcaaaggattcatgaaccatcttctgatcgggaatacttttgaccattttcccatggcagaagtttctgtcacaacctttaatactttttccatagacgggatgataaagaaagaattttttgataccgacacacaaaatatcctgacccaaaacagagcagtttattctgcatggaaggaaataagacctttttgtttttcaatcatacgcggaaggcgaactccactgcaattcaaaattgtatttcagctttcgcctgaacagtttttctctatttttgaagaaaaagagtctgatcttttttctgctgtcagcagtttttctttcattatacagtataaaaacaatatgcttctgtgtactacaggaatctctcaaatatacttttccatggacaaacgtgctgaacagttctgggacgtttccgttcacaactttttccgcggtctcggtattgactgtgaatccctgtaaaacagttttcttttatcttttttatcaactatctgtcatctgaactgagataaaatgccagcatgtctacaaactcgctgtttgtaggcttgtaactcagaggatatccggcaatcctgtccatttgatctttattcgcacaccagcagacattgactacagtccggatatcatgttcaatattgttcggggtagatttatattttctcgccaacggaggatacacatccttggtaattctcaggggatatccggctgtctccatggacagttttacagcatctgccacaaaataatatcctttgtacttcgatgttactcccatctgtctgattaaatggtatactttcctcatttctttctcctctgaaatttatttctaattttctttttctcccatatactatacgacaatttatcaatatttttctatttactaaataactcgtggaatatcgagagaaaaagtaattttcataattttttcgagattcttcaacaaaaccttgctcggacatacttttctagcataagaatcacgatgtaatttgtcaatattaatttttggcgttttatatcaaaataatacaaaaatttatattttttactctatcagaacattttgtacttatttttttatgtctgtctctttattttctttaaaaaagaatagtttcttgtcttttagaaaacatacaaaaatcccggttaccttttcaggcaccgggactttactcacattcattttggtttattttgtcagcagcatcaaaatatcattgcttctctgaacaaattttgtcatttcatctggtgaaagctgcttgtgactgatcattgccagatcataaagctgttcacagataactgctgcatgttcagactcctgattctctgcaaggaacttcaccagaggatggttaatgtttaagacaagtgtttcctgtccgccaaacattcccggatccattccatacatattatacattttcatcatatcctgcatacgacggctttcctcagaaagcatcatcattgcggatactgcttcattcttcagactttctactttcacttcaagcttttctttattcaaatttttacggaaaagctctgtcagcgtttttgctgtatcgtcatcagcagcgtctccgcccttcagctcttctgtcagatctgcatcaattctcttaaactgaagtgtctgatctctctgctcaagatgagaaataaaggcagtatcaatattatgagaaagaatcaccgcattctttccagcttccttaaacatattaatatactggctctgctgtaccggatctgttacataaaatactgttgtcttttccggttctttctcatctttattttcttctgcattttcctgagtctcttcctcagtgtgttctgcctcttccttcttgtttgcctctatacagtctttaagggtaaggtatttgttgtccagatccttaaacagaatatagtcatgaagcttgtctgcaaactttgagtctttaatacatccaaatttaataaacggactgatgtcatcccagtatttttcgtatgcctcgcggtctgtcttacacattccggtcagcttgtcagctacttttttcgcaatatattcagaaatcttctgaacaaatccatcgttctgaagtgcgcttcttgatacgttcagcggaagatccggacagtcgatcacgcctttcagaagcaacaggaattccggaatcacttctttgatattatctgcaataaatacctgattgttgtaaagtttaatggttccctcaatggaatcatactctgtattgatcttcgggaaatacaggattcctttcaggttaaatggatagtccatgttcagatggatccagaacagcggctctttataatccataaatactttacggtaaaattctttatattcttcatctgtacattcgtttggatgtttcatccagagcggctgaggattacttaaagaaaccggacgtttgttgatctttacacggtctcttgcaggagaaatttctacgatttccttttctcccttgtcattttctttttcctctgtttttgcctcttcgtgaatatgctccacaacaacatcgtcatctcttaaatcagcttcatcaattgtctcatattcctgctctgcattttcttttgcaagataaatatttacaggcataaaggagcagtatttttcaagaacctcacgcatacggtattcattacagaattccaggctctcttcattcagaaacagcgtgatctctgtacctacagtatctttatttccgtcctgaatgtcatattctgttccgccgtcacaggtccagtgaaccggaacagagccttctttataggaaagcgtatcaatatgcacttcatctgctaccataaatgcagaataaaagcccaggccaaaatgcccgatcatctgatcatctgttgttttatctttatatttctccagaaattctgtagcgccggaaaaagcgatctgagtgatgtattcctccacctcgtctgcagtcataccaataccgttatcggtgaatttcagagtctttttttcagaatcaacggttacctggattgcaggcttataattttccgggaaactatattctcccattacctccagctttttcagtttggtaattgcatcgcatccgtttgatacaagctcgcgcacaaaaatatcatgatctgaataaagccacttttttataataggaaaaatgttgtcactgttaattgataagttaccatgctttacagccatgtattccacactcctttgtttttttcatttctgtgatatatagtaataccctttctcataaaagtcaagaaaaaactagcactcacattaaatgagtgctagtaattttgttttgtaactttttatttctttttacggtaaataatcacgcctgcaatggctgccgcagctactacaagaatcaccacaaaaacagcgatcggtgaatcatctcctgtttttactgcatttttgcggtttgctgcaggagtaaggttctgtcccggaccagtaacctttgccttggaaatggtaaacggtactgactttgtatcataggtttcagaactcttccatgtttttccgtcataggtctgaagctggaaagtaaccttcagtgtgtaatctccgctctgagccaggccaaaggtagctgtatacggcgctgcatcccagttatttgtattgatcacagtccagttcaaaggaagatatctggtatcgccttttctcggagatacattgtccattcctgcacctaccgcagtaaaggaaattctggattgtgtagtgtacactccattgtactcgattcctgtgatcttattctgatctgcagatacagtttttgaagtatacgcttttacactgaccttaacacttgttttaagctccaggttcttatcattgtcaacaccttccggaagcttcacagttccctgaacacggaagctctgcgcatctgtatcggacggatcatagctgcagttcttcacatcccaggatactgtcgcattcatatttcctgatgttgtttcaattacaaccactgacggaagttttaaggattttgcttcctttttcgttccgtttgccagtccggtaatatctgccggagtctggatctttgtaagggatgcgcttcccttgattacctggaaaactgccttaaagcctgtttttgcgctttctgaagccacttctacggtttcctggtaaatatttacatcaagacctgtcttcggccttacggtaaagcttacagagtctcccggctgcagagtcagcgctgaagcttccactttacttacttcaaaattctttcctgcaggctgtaccagtgtctcagtaacatttccattattggtcacagtaacctgctgggcctcaatctgtccgtatcctttttttgctgacgcaaaatccagttcggaaggagctgcgctcaggctgtgatttacagcctcaaccgtcagactggcagtaatttcaattttctttccggaggtttcatctgcaaccataaagctttcctgatagcttcctgctgccagccctgttctgggacgaagaatcagagttgtactctctcctgctccgatcttctgatcagcaagaactgcatcaaagaactgaggatctccattttcacttgccggctgagagagagcagcttcctctgtgccatgattggtcagggtcacagatttttctgcaggagcttccccatatccctcaatcacagccccaaaatccacaatatcggtatctggcgcaacatcactgccgccctgcggcttctctgaaggaatattcagtttcacctgtaccgaaactgtattttcactgttgttgatatctgtaaaagataacacgtcctgataatctttatctgtttccagatcctcggccggaatcacagcaaactcaacgcttcctcctgccggcacaactgctgtacccggatctgcgatcacttttcctgtctctgtgaatgcctcaactgtgatatcctcagaagaatcattcgtgatcatcagcttctgagcatcctgtgtgctgaattccattaactccagatcagcagacagtgcagatccttcaggagtctccggctgctctgagtcttccagaaccattcttgcagtaaaggaagcttccgctccttcttccgtctgatatgcaatagtatcttcatatgttcccgccgcagttccctgtcttggtgatacccaaagagtcacctctgctcccggctcaaggggatcatgaatgtcctgcactgcaaaatgttccggggtattttccagaaaatgcagtgtctctgttcctgtattccttacggttacattctttgttgttccgtctgctgtttctcccaccggaagtattccaaaatccagaacacctgctccgtcttctgtgatcacttccacactgaagacctgttcctctgtaccggaaggattttcctgttcattctcttccggaatgctttcttctccgtcttcctgtgccggcggaatgccgtccacggactcgcttcccgcctcaccgttctcctcttctgacggatcaaacggcgtcaggatctcatcctcatttaaagtctcttccgcttcatcatatgtttcttccggtacgtctgtatcttcctgcgccggcgggatgccgtctacagattcgcttcctgcctcctccgggatttcctcctggggtgtttcctgcactggctgttcagcgtcttcctgggagggttcttccggcaggacttctgtttcctgactgttattctcctctgtctgtgccggctcctgggaaactgctgttatctctgttgtttctgctttaaggcttccggtatagcctttatcttccagcccggtaattgtcagaagaatctttgaccctacatcgtcctgggtcacagaacatgttttttccctgctgagttctgtaatgttcctgttatctgtatcagatgccgcctttctggaccatacatagctgacgctgtcctctgatattccttccggcttcactccgttcagatcagcactgagagttgttccaggagttgcatttccgttgatcttaacctgcccttccaaagtagataccgctgccgcaaacacggccgagggaagaagggacagcaccataaaaacagacatgacgatcgctgcaattctttttgctctcataagtcatcctccttttctgctttctgctatttttctattatgcccatttttaccggagtcatggacttttacaggaattatcctgctgtaagcaaagacacagttcagtatctcctatttcctgtatggttattatagcatatataaaaacaatcatgtaatctctgttttacctgatccggtaaataaaaaccggagaagctgcagtctgtttgtgcttttctccggttcttttatttcttcttaaatgaaaggctttctttattttaaaaatccgcttatgatctgctcttctgcttcagcttccgtaagccccagcgtcatcagcttgataagctgctccccggcgatttttccgatggcagcttcatggatcagagccgcgtccacatgatttgcagtaagctgaggaacagcgctgatctttgcattttccataataatggcatcgcattccgtgtgtccgctgcatctggtatttccgctgatgtgggactggaacagctgccaggattcatctcttgccacagatcgggacacaatattggcagaagagtcctctccgtcaagctgcacgtcaaaccagctttctgctttctgttttccatgagtcatcagacgctccatgaccaccagctttgcgccagccttcagatgggctctgttttccctctttgtagaatccacgcctctgatctggactgtttccatttccataaagctgtcctcatccaggctgatctctgttacagggttcataatacgctccccgcttccatcgccgcttccataatgcttttccacatattttacatgagcatttttaccgataaaaaatctgtggattccgtcatggcggctggcggcatcccctccgttatggattccgcagccggcaatgatcgtaacgtctgcattttccccaatataaaaatcattgtaaaccacttcctcaagacctgactggctcatgatcaccgggatatgaacactttccttttttgttcccggcttaatatggatttcaatgccgcttttgtccggtttattgatgatttctatatttcccgtactttttctttcaatactctgtccgttggaacggatattataagctcctgcagggatctcatgaagaccggccacctgcatcagcagttctctctgtattgcgtccatttttctcactctcccctttatttacgatttgcagccttatcacaggatggcgctgcatttgccgttcccagaagctccggcagaacctcttcctttgttcctttttttacaagttttccgtctgcgatcagaatgatccgatctgcaatattcagaatgcgttcctgatgcgaaatgatcagaatggagccgtgaagctgttcatgcatttcctcaaaaacctgaatcagattctgaaagctccagagatcaattccagcctccggttcgtcaaaaacagatactcttgtttttcgcgccaggatcgttgcgatctcaatccttttgatctcacctccggaaaggcttccgttcacttctctgcggatataatcttttgcgcataagcctaccttggaaagatattcacaggctccggctacagaaatttcttttcctgctgccagacggagaagatcaaatactgtcacccctttaaatcgcaccggctgctgaaaggcatagctgattcccagttttgctctgtctgtaatactcatatccgtaatatcctgtccgtcaaaaaggatctggccggacgtaggcttttcaatcccggcaataatttttgccagagtagactttccgccaccgtttggtccagtgatcaccacaaactggttatcctccagggtcaggcttacatcttttaaaattccgatttcttttgtatttcttgttttttcatcaggcacctggaaactgatgttttttaattccaacatatcatctgttcctccatacaggcagaaaatccgcccttatttttcactgttatatatcatagcacattttttcttacatggatgattttatttaagaaaacaggagagccctgacagattttgcgcagtactctcctgattcttatttctgtactcttatccctctacgatcagatagccacctgaaggcagtgcaaatacctcgcttgcctccttcagctcttcatctgtcattccctcaatgtcagctcctgcttcatccagatagcggcggacctcttttaaggtttttacctcaacagccatacagtcctccagaaattcttctgcctcctcatagctttctgccaccggctcgtcatacagtctgctctgctctttcagaaatgtttcaacgctttcttttttgtacatcttcagattacctcctctatttttccatttgcccggatcaaacgttccaggattagttctaccctttctgccgtataggatgccgcctctattactcccggtttggcatgcttcatggcaaagctccagggaactgctttcagcatctcaatgtcattgtattcatccccgaataccacacattcctccggtctgattccaagctgattctgatattcttttaatccctttgccttattggttccaaaaggaataaagtccacccattctgtccccgaggttacaaccgtacatttatcagaaaaacgctcctgccagtaccggatcgaatcctcatgaagtcctctttcatatacagcaagcttcatgcagggttctttcacttcatcaagactttctatcactttacttgttgtttttaccacctttgtcatcaggtccagataatgctgtgttttcggacgtatataatagaagtctctggttgcgcaggaaaactctgcgccgtccttttcttctattgcttccagaatttctctcaccagctccggctcaaaattgtcctgataaaaaaccttttcatttcttactgccagagccccgttttcgcagataaaagccatctcgtctgccaccggatcaaacagccttctcatgttgggatactgtcttccgcttgccgccacaaaaagtattccaagctttttcagttctctgatcaatgggaaaatctcttccggaagctgctgtgccccgtttaagagaagagttccgtcaagatcacttgctactaatttaatcattgttgtattcctcgtaaatttttaatagttccttcggattttctattataacccctgctccgttttcctgaagctcctgcctgtcccggaagccccagagaacgcccaccgtgtgcattcccgccgcgtttcctgtttgcatatccgttttggtatctccgatataaagacattcctctggttttgctccaagtacttccgccgcctttaaaggtccgtcaggcgcaggttttctgcggatttcttcactctgcccgatcacaaaatcaaaggtactgccaaacagctccccaacaaccttcaccgcagcgtcatggggcttattagagcagactgcaagggcagttccctgttttttcagccggtcaagaagctccggaatcccctgatagatcctgactttatacagagggtctgcattaaacctttctctgtactttctgcatacttcctcataatgcataagctgcggatcgccggcatccttcaggcagcggcgaaccagcatattggctccctcgccgcaataatatctgaaatgatccaccggctgcctctccagtccgatttcatccatcagctcatttgccaccgccgccatggattccagggtatcagccagagttccgtcaaggtcaaagatacatgcttttatcattcctgccacctcagttctatacctgatttttttgcttcataaaacagtcgtcccacaggcaggccgactacgtttgaatactctcctgaaatacttttcacataaataccgaatagtccctggattccgtagcttcccgccttgtccataggttctttggtttttacatagtcccggatttccttttcagataccggataaaaggtcacgtctgtcttttctgtaaaagaagttttctgccatttaccacaaatattttccagaatggtaactcctgtataaacctgatgagtatttccctggagcattttcagtgtctgtactgcatcctcttcatctttgggcttacccagtatttttccttcaaaaaccaccactgtatctgcgcccaggatcacggttccgttttccgcctccggaaagaccgccgaaaaagctttctgagaggacagctcttttactgcctcttccggatctgttcctgtaatatgttcttctccgtttccgggacagactttaaaactcactcctgctgcagccagaagctccctgcgtcttggcgatgcagaagccagaattatttttctcataatctgttcattcctttttattcttcttttctgtattacagtataaccttttgcaaaaattgtcgcaaccggaaaaatcaacaaataaatctgctcttccaccagactttccttttctttgcaaaccgggtaaggttccagaaattcctttttcattttccttcataaattttttaaaaaatttaaaataaaatattgacaatcaattcctcttctgttaatataatcaactgtgagcggtacaacgctgttacaatttcaaaatgctgatgtggctcagaggtagagcacttccttggtaaggaaggggtcacgggttcaattcccgtcatcagctcgtctaatatgttgattttaaagggtttttgagtccttgtaaaatcaatgggaatcaaaaaggtaatcagacatgtgtctggttattttttttacaaaaatcccccttcttcccctcttgtcatttgatcactgattcttaatcccccgatgcttttaagtttttccgaaggttttctcataaaaacttttaaattcccgaattttatgatatgataaataatcaagaacatttcaggagggaacgagatggagaacgaaaccatttccaaaaattttatcgaaaatattattgataaagatttagccgaaggcgtatatgataccgtacacacacgatttccaccggaacctaacggctatcttcatatcggccatgccaaatctattcttttaaattacggacttgcccaggaatacaacggcaagttcaacatgcgttttgacgataccaaccctaccaaagaaaaaacagagtttgtggaatccattaaagaagatatccactggctgggcgcagactgggaggaccgtcttttctttgcatctgactattttgaccagatgtatgaggcagctgtaaagctgatcaaaaaaggcaaggcttttgtctgcgatctcactgctgatgaaatccgccagtatcgcggaactcttacagagcccggtaaagagagcccttaccgtaaccgttctgtagaagaaaaccttcagctttttgaagaaatgaaagaaggaaaatacgcagacggagaaaaagtgctccgcgccaaaatcgacatggcgtctccaaacatgaatatgagagatccggttatctaccgtgtggctcacatgactcatcacaatacaggagataaatggtgtatttaccccatgtatgactttgctcatcctattgaggatgctattgagggaatcactcattctatctgtactctggaatttgaggaccacagaccgctttatgactgggtggtaaaggagctggaatatcctcatcctcccaagcagatcgaatttgcaaagctttaccttaccaatgttgtcaccggcaagcgttacatcaaaaagcttgtagaagaaggcattgtagacggctgggatgatccgcgcctggtatccattgcagctctgagacgccgcggttttacaccggaatccatcaaaatgtttgtggacctctgcggtgtttccaaggccaacagctctgtagactatgcaatgctggaatactgtatccgcgaagatctgaagctgaaacgtccgcgtatgatggctgtccttgacccgatcaagctggtgatcgacaactatccggaaggtgagatcgagtatctggacgctcctaataatatggaaaacgagtctttaggctcccgtaaaattccttttggaaaagagctttacattgagcgcgatgactttatgatcgacccgccgaaaaaatataaaagactgttccttggcaccgaagtacgtctcatgaacgcatattttgttacctgtacaggctttgaagctgatgacgacggaactgtcagagtgattcactgtacctatgatccggctaccaaaggcggaaacgcaccggacggccgcaaggtaaaaggtaccatccactgggtagaggcttctcaggcaggacaggctaccgtccgcctctacgagaacattgtagatgaagaaaagggtgtttataataaagaagacggttctctgaacctgaaccccaattctctgactactgttactgcttatgtggaacctgagctcatgaaggcaaaaggctatgacagcttccagtttgtgagaaacggcttcttctgtgcagacattcacgattccaaagagggacagcctgtatttaaccgtattgtatccctgaaaagctcctttaagcttccaaaagcttaatagctaaaaacagcaaaatacccgccaggactctgatgatctctttcatctgtccggcgggtattttttcatgcagtttatagatttgtgtatcctgtactaatctgtactaatgcgagacttttagaaaaatcagcagttctccttccacttctgaactccggcatctccgaatttctggatatccatgatcatggttcccacttcatccattgctttttccgcatctctgcccggaagaacttccagccccctgtcaacaaaataatgaaacattgatgacagcgcagtacctgttccgtcttctttgataggacttgcaaatccgctttttgtcatgatcttaaagctgaagtttggccgtatacaggctaatatataatgtatgacaaacaggagcataaccagtaccatgactatggaaccaaggccgtcccttgccatataagcggctcccggcagggtaaacgcaagcgcgatggcttttgcataataatgttttctcagaagaagcaaaaagcttcctgatatcagaagtccgagaaccagctccagcgagggtgagctgtctgcaataaaaaggccgaaataataaaatattgctacgatcacaaggttcagaagcattgcaacaaagctgaggcggcttccgtttctgatctccattcccactacatcatccagagtaaattctatggatttctgagcgcgtcctgaccagttccttccgctgagccgaaacagtacacgtttatttgttacctgcagcctgccctcctgccacattccctttaaaagagaacgcgttgtacacagatcatattgtcttacgggaatttcctgaccgcatggctgaatgagatccggcacaattttcattccccgttcatagcagtcccctacctgggcaatcctgtcctctttcgaaaatccaagcagcttgcgcacgggtaccagattactgattcgtcccggacggtcggtaggggtcatgaaattataaattttatccagagcatttcccaggctgcgtgaagttgtgtttaaaaaagaaataattccctctgaggactgcttttctcttctgtatgagttgtcccactgagactgtcgaaaggcgtcttcctgctccggctgtctctgctctgcgccggaagcagctccttcctttttacagtcgcacacctctccttcctttaaaggtcttccgcattgtgaacaaaattttgccatttttctcctcctagtaaatactgtaaagatcagcagagcaaattttccactgcccgtcttccatgataaaggtcatataagaatctgaactgccggattctgacctgtcttctgcagttgtctgctggtcataggaaagcgaagttcctgtgtatgtataatcataattatagcttacatgcagattcacataagaaccgccatactcatcactgtactcatctgtgacctcactgtaataattactgaagttcatacctgtaaactgcacggactcatagccattggtatatgcaaagtcctcttccagcttcctgtaaagagcatctgcattttcccgggctatggcagccgtctccttattgccgttgtttacagcccagtaatccagatatttttcagaggggcctgactggttcagaacttccccgtaaacatctcccataaacttcctgactgtttcctgcatctgttctactgtttttttgctgatggaaagctttggtacctcataatagctttcgtccgttgaaatatagcagggaaattcttcctgttccctgctgtcagcagaggctgtgatcacgtgatctcccgcaaaaactgtttctgcataaacatcatatccgctttcttccagctcaggctgttcctccggtgtgagagctgtgccatccatctccactttatagccaacgggcgcctttatcgtgtaattggacacgatcagtccttcaggtatcacacaccatttggaaaagaaaagcatttttttctctttctgcctgctcagagtcagctccatacttcttacagaggagtctcctttcacggaatactctgctgtatattctttcagaaatctggaatctgacccgccatacccgtcctgttcctccagcttcagatttgtcacctccactggttccctttcatgggtaacagccagaaactgttcttttccaaggagctttccctgaggcagctccagattttcgtagacactcttccagtctccctgcagaacagcttccacataattttctgcagttttctttggaccaaaaaaactgccgccggcccagatcacgcctgtcagaacaagggccacagcacctgcaatccctatattccgttttgtttttttgcttaaaggcggaagctgttccagtttttcccgaatatctgtttccggtccccgaaaccgctgttctgcctgctgtcggcttttcgtgcggtcaatgggtttgtcaaaaatatccggtccggttatattttctttctgtccataatgatgatcctccatttccttttcctccttccgtttattttccgtaaaccataatttccgtaatacaggtatcctcggcagttcccgcatatacatcattgatttccaacagaaccgtgtcagctgtaacaggcgggtcagcttttacccactctacttttttatcgccatcaaaggttacctgtccggagctgtctcctgccataaaggttactgtttttggcttcgagcttccggcataatgctgatcgtccgtccagttgcccagcttaaagcccagatactggatctggtacgtatcatccagtccaaagcttacactttctccctttccggagccttctgttccctcctgccagaacgtattgtcttttttgtcaaacagcagcatgggactgtgatctgtgtcaggccgggcaaaagtcgaggttgcgtttgcggtgatcacccccgcctccctcagagaagtaagatccggttccactgcttctaatagaaaagctcctcccgaaccactattctgttcagaaatattttcaggtgcctcttcttttaatttcacactgactccggattccgttatatcttcatcttctgtcaattcacttatgtctgagtctgatgtattttcttctgtattttctccatttgttgaagtacctgtctctgatgccgacagctcttcttcgtctgttatcgtattctctccgtctattggtatgtctgtatctgagcccgatgaaagagccaccgagacatcgtctttattttttatattttcttgttttcctgtttcttcatttgattgcgcattctttttatctgagccttcattttttatctccgctactgcttctcctattttcacaatgggctctgcaggatccggctcagaggaattcaggattttccatgacaggattcctgctgcagctacaaagaccactccaaaaagtcctgctgcaagccacctcagcttcttatttcccgttttcgcttcttccggttcccacaagggttcatttattcctgattcttccggttcataactgtacggagcttcaggcagctcttcattatccctgagcttaacaccacactcagggcagtatacagcattgtcttctatttctgacccacattttttacagtacattttctccctcccatcaaaattttctgtttcaggtcatcatcttctttttttgatatatattgtcttctattcattaaattcacctgattttttgcaaaattcctgttcttattattgtatacaacaaactatacctacaatatgtgacaccttttgtggtcgttttttttaatagcatagggcattaaatattcccaaaatatttgaaactcccgacagccttctatataatagtgatgcaattaatataagtgaggttttacaacatgtcggatttttcagatcttttaagtaaatatatacaggaaaaaaacatccaggtagcttccatggtaaaatactgtggaattgaccgctctgccatgtacaaaatcatcaaaggaaagcatcatcctcccactgtacagatcagagataaaatggcccgcttcatgcatctgacaccggaagaaaaccggcttttcaaccgtgcatatgaaatctcccagataggaaaggatacttattttcgaagaaaagaggctgaaaagttcattttaaactttccctcggctctgaaagtcccggtttctgcaaatactttcagcacaggctctgcaccggaaaaacccatttctcttccggacagcccatgtatttctttttcacgccatgagctgtttcattattatgtacagaatatcctggaagcagaaatgcagactgaaaatggaaaaataggccttttacttcagcctgactgcgaatttcttttcagttaccttaccaatctgaattttttcagctccggtctttccattgaacatattctgtgtatggattatacagaaaaaacagacacttactgcaatataagaaacttatctgccatacttcctcttttcatgaacgggatcaattatcaggtatctttcttttacaacgatgtacattctcactatcgcagtctgaatgtttttccatctatgatccttaccagtaaatatgcgatcacctgtacctctgattacaaaaacggcattctctatcaggatccggctgccgtatccatgctgtgggagcttttttcatcttataaagaaaaatgcaggccgctttttcagattcctcattccattgaagaagagggaaacatggtcactgccacaactctcagtaactccagactttactacatggaacctgagccctgtctgatcccatttctggaaaaagactggatggcgcattttgttccggaaggctttccaggaagagacaatattatcgcctatatgcaggcctacgtaaaaaacgcaggtcaggtaatacgaaaatctgaatttcatttttatttttgcagagatgagcttgacaaatttgcagaaaccggaattctggctgaacttccacaggagctgtcccatacttgcacgctccctgtagaggaacgcatcactgttctggaaaatctgctgaagcaaaaatccagggctcattaccgctttttgaaaccgccctttgaacagattgccaaacggcttcatctttgcgcaggcgaaaataatatgtacctgatgttttttgatattatgtcccaccgttcctatctgtggatccaggaagcagaaatcattcatacgctttatgattatcttggaagcctggattccgaaacattgtacagcgaagaggaaacgctggaatatttccgccggacaatcgaacatttaaaacaatccatcaaggaggcttcacattgtgactgaatttccagaactgttgaataaatttatagagcagaaaaacattcatatttactctatggccaaatactgcgggctggaccgctctactctctacaagatcataaagggaaatcgtcgtcctccgtccgcctctgtcagagataaaatggcctgctttatgcatctgacgcctgacgaaacccgccagtttgaacaggcctgggagatttcttttacaggaaagctcacttactgcaggcggaaaagcaccgaagattttcttttaaatttttctgacggtttttcagacatgcctgtaaaaaaatcctacttttccaaagagctgcctgctgacagtccctgcattgctttttctgaaaaagacagctttccggcctatcttcatgcaatgctgaaaaaagaatcccattccacaggaggcagaatgggatttctgatacaaccggactacagatttttatttcacctgctgagcggccctgaattttttaacagtacagtaaggatcgatcatattttttgtcttgatcagacggaacagctgtcggaaactgatgaatactgtcacataaactatctcaaacagcttcttcttccatttaaaaacgggcttgactatcatccgtattgcttttatgacaatatccggacacatttttccaatctgaatctgtttccggtactgatcctgacagaaggctccgccctggtttccacctctgactgtaccagagggatcttatatcaggaccccgctaccgtaaaaatgatgtggaagctctttgacacctatcagaaatcctgcatcccggttctcagacgaagccaaaaaagctttgataagcttccgtgggaatgtactccttcctactttgccgccgataagagctttccctgcttttttacaaaaccggctctggaatcactgggcaggcttgattctctgaaggcagaagctttgaaacagtacatcccagcagatttcaggtttttaaagggcgcgctggcagaggcgtcaggcagtcttcacctttatgcggaaaataatgttctgtatctgatatttgatgacattcggaatactcccgttcgcctgtccctccatgagccgggacttctgtctgcttttgaagattacttaacccacatacctgcaaaattttgtcaggattccttttcaaaatgctgataatcaaccggatcactccatagaccgccccagctgaatccatattttgcaaaaatattatagcatacatcattttctacaatcacatgaggatctccgcaggcgcggtcaacatagggagacgcattttcatggctccactgaagctgcccctgggagctccatacataaggattctgctgtggattaatgtcaatggcccgtccgtaggcatgatttgacagatttcccccgcctgtgatctgccgataacagaatgcggacgtattgttattgtcaatggaattgctgtcagaggaatccccgtctcctgtccagtaatcatcgatcagacgcatggactggatctcatactccgcagcaaataattcctgaaaaacactgagcacgtcattgctgatagcagcatttacgatcatttctcctacctgcacctcatggttaaaattataatgaagcattttcaggtacctgagatcctgaagccctatgttttcattttcataataggattttccgtagattctgttatacacagcgtctccctctgaaatctcatatgccttaaaaaatgtattttcactgccctggatctgagaactgtcaataatctgccctggctgaagctggtcaaccgaaagcgccgggcgggccggaggaccgatcattgcattttcttctgctgcctcttcctgtggattctgtgcagtttctccctgaaccggggcgttctttttgtagtctgcaatttcctgttcctgaaccagaaccttttcattaagcttctggatctcctgtttcatctggctgatggtttctgatagttcaatgtcttttttttctgcagtccggctgttcttttgcagttcttttttcattcccacaaaggaataacacagaagccccattacaagaaacatacaaaccatgcctgtaaaaagcaggatccacaatgtatttcctgatttatgactgttttcttttttcattggctgttctacctgttctctcctgttgtcatttttcatatacagatgttctctccctgctgctaaatctcattttcaatttcactgagcagcttttttctctgtttttcaaaaattccgggcagaatacacaaaaggatcatacataccaccattcccacgattccaccggccatcataacaacgcctgctcccatttctgttcctcccaactttttgtaaccggcttccgttctcttcttttctgttttcagctgctgaaccagccgttggaagccgcctgatcataaagctctttcagccttttcatttccatatcgtttacattattttcaagctgctgctgataaagcttttccgctttctcataatattctttgaacaatccatagcttctctgatttacgtccactttttcctgttttgacacttccataaaggccagcgccttataagtgcggtaattctctccgtactcctcaagcatctctttcaaaagagcagaggcctcgtcatattttcccatattctgataaaggacaaccagattataatctgtatcgtagcttcccattccctgcttctggatctgtttaaatacctctgccgcctttgtataataagctgcatctccggtatcatttcccatgtcgctgtacacctgtcccagagtctcaagaacacctatgttatattctgtaggcagttccttcctggccttttcaagaagctgtatcttctcatcatagccgcccacaccatcctcaagcgcgtcaatacatttacatgtcataatgcaggcgcgcattttcacatagtcgttctgcgccttttccatacaggtcagaaagatttcttttgccccctgaaaatcctgattattatacaggatctctccctgaacataatcaatttccacagaatcaagtccctgtcttctggctgtgtcaagagccttctgagccttatccatttctccggtataggcaagagcaatggcatagtcgcggtaataatcactgttgtccggcttgatctctatggccttttcatagcattttgcagcattttcataatcttcctgtttttcgtaggaatttccaagaagatagtacacattatttaacgcttctgaatccacttcaagctccgggtttgacaaaatcttttcgttaataaaattaatattgtctccatactgtctctgctggttcagagccagagctttctgataatatgcctccagtctttccggcataaggcctgccgctttctgataataggattcaaaattctcaaattctcctgatgtcacgcactgggattccagtcttacaagctcctcatactgctttctacgatccacatctctgcggaaatatccgtttactgtaagcacagcgctgactgccataaagaaaatcaccagtatataaatccctttttgctttttacaaagctcccggtaccgtctgtcctttttctcaatgtccttcaggtcgctgagaagcgcctctgctgactggtaacgtttttccggtctgggctccagacacttcataataatatgggcaaacacctggttgatgcggattccccggctgcggatatcctccacatatccattttcatcctgggaaggctttttccctgtcatcaggtgatacaaaactgctcccaggctgtaaatatccgctcttctgtcaatagtcttccagagggaatgatccagctcattctggttataacgcagcgcctctatctgttccggaggcgcatatccgttggtatatccggtcacccaggcagtatctccatccaggcttgccgatatattaaaatcgatcaggcaaatatttccatcaggcttcagcataatgtttcccggcttcagatcactgtgaatgatgggcggcttctgactgtgcagatagcttaaggtggcgcagatctgtcttgcccagataagcactgatttttctttaaattctgtgcctgcatccagatattccttaaaggaatttcctggaatgtagtccattacggtatatacatctccgtctgcctccagaaaatcaaatacctggggcagacagggatggtggagatttttcagtacatccgcctctgcacgattgttcagaacatccttgagctctgcccggatctttttcagtacaacatattttttcagatttttatgataagccttataaacctctccgctgtttccggcgccgattttttctataatttcataggtgtctgatatgtgcttcagcattctgtcctctcccttattttccacatgtagtattgtctgtgacactgaagttcatgcttcctgatcccggctgcattcctgcgtttaccacaacaaggtcctgcactcccggttcttttcctgcaagtccgcctccaagcggatttggcacgccggccatatcctgaaccggattgtttgcaagatccattcccgcaagcatgtctgcgctttcggaaacccaggagccgctcattcccgcactggaaagagcgctgataaagccgtcctttccgccttcctgcggagaagatatggttccgtttatcagtgaagcagaagctgacatattcagacttccgtctgctcccatggtataaagcgctgccactgttttggcgccgggatttccatcccctgtgttcattccaaaataatagccggccattccaatatcaaatcctgctccgttttctctgataaagcaggtctgtgttcctccgtatgtaactccttccacagcctttccaaaacattcctcaaatgcaactgaagaaaccatggacgctgctccgcctgctgctgtataggtatccagaacaagctggccgtttctgatggagattacaagaagttcctgcattccatcaccgttaaaatcacgcttctctgctccaagtgttccactggctaccgccataccggattcgtccccgtaggtataagaagccggagtactgagagatgacctcggacttgctgcaagaagctcagccgcaaaggcatccagaatctgatccggcgtaagcgcatcctgttctgtctggctgtcctgattttctgaaggtgcctctgcattgttctgatctgtcggaggcactgccggttcttccggggcatccggaactgccggcggaatgcctatgtcctccggataatccgggactgccggcgggattcccgtgtcctctgaagaatcctgcgaagattccggagcaggctccggctgaagctccggatccgattccggctgaggctccggttctgcattcatatcaggctttggagttggcgtctggttgggtgcaacaaccactgtccagcctcccggtatgggagtctctgcaggatccgtcattggttcaggggtaatttctgcatccggatcaactggcataactgtggcttccgggcttacttcaggagtcactgtgggttctccttcctgattctcttccggtgcttccgtaatctcaggagcaggtgtttcctccggtgttaccgtaggttcttcctcctgttcaggaaccggtgtcgtgtcctttttgtcctcttttttgcctggcttttcagaaggcttcggggtaggcgtcacgtaatcattgatgtatatatgtatatcgttaaaaatattaatcacatcttcggatgtatctgtatcagccggcatctggtttccgctgttctgataaagctgttcagtctgcttgtaaaccgtttcatacatatccatcttgcttttccacccgtccggattggaatttaactgggctacagacatattttccagatttttgtttgtctgttccagcatctttaaagccttttcaggctttttcattttattgtaagtatctgccagtttaatggttgcatccggtgatttttcatcaattttcagtgcttcctgaaaggcaagctccgccttttcatagtcgccggattccagatatttatccccaagctccagctttttctgaagctgtcctgccgttgtattttcgggattcataaaaatgatcacagctgcgaccataagcacacagaccgctcccacgatcacaggaatcaggatttggggatctggttttgattttttcttttttatctctttcattgtatgtcactctcccttccggaaaataaactcttcatcagaaagtctgatccggtcctcttcctgaagctttttgggatgtccgggcatcacgcggattccgttcagatacgtataattgctggaatccatatcttcaatatagtagtcgccgtcccggaaccggatcacgcaatgttctctgctgatggttgggttattgcggatgcagatatcagccattaatgcccttttgccaattttacagttttctgttgtcacggaaaaaacttcctgggtattgatgcggataagctttgctgtaattttctgaggctgtcttaaaagtacggtttcactgtctccatcgtcacgtaaaagcacagtttctgagtcgtcatcagaaaaatcctgggcctgtacgggttcatcaggtatctgtacgggaactggaatttgtggattgcttttctgttcccatggttcgtacccttctgaacgttccagaggattctgaatttctgaactgttccagggatttccagtttccggctgggtccatggcttctgctcttctggttccctccggggatttgcagcttccggctgattccatggggtattctcttctgctatactccgggagtttgcagcttctgatttctcccagggattcagagtttctaaactgttccgggagagtgtattttccagctgattccagggtgttctgcccggaacagcatcccgggtttctgaatcattccgtaaatctctgtacggaaaatcatcctggatccctgtttttttccacacatcctttttgggattattctttcctgtttgttccgaaaatcctctctcctgccactctgtactactttggttcacttccggtctgtcataagccggttcctcaggtatgggagggatcagaatattttcctgttctctttttttctttccctcagaagattttcttctccaccagcggcttttgcgttctactggtttctctataaaaatatctcccggcatgtctccccttggctccggcggtatcagaggaagaggggctgcggaggccttgccacagtttttccctgtttcggtgcgaaaagcttctcccatatccgcccttacaggaatacaaatgagctttatctctcctgtggatatctccacatagatatactgcttttctgtcagtatttccccctgaggaatccctcttctgatcacttcatttacagcagcttctatccttctgtctgtttccatctgttcatttactgtctgcccgtctttccatgccatcatattgatcattccggctatgtcataggtaaaactgtatccgtcattctcttttctcataaaaaccggaagcagatttctactgactgccccgctgctgatcacagtccaggactctgtatcaagagcttcattttcctttgaaacatagctgaatacagtatgtccgtctgtaaaatcatagataaattccatcttttttctccccctgtttttaataaatgtcaagctggatcagcttccattttccattttcttttacaggagcagccccttctttattaaaggtttttgctccctcaaactgaggttccaccacaaaatctccgttttccttaataaatccccatttcccgcctgagcatacaggagcatatcccagttcggaaaatgctgaagcattttcaaacatgcactttaaaacctgatctccttttgaagagacaaatccccattttcctgcctgcataacagccgcgggaccggatgacaaaaacggagaaaccgcatcgtattcatcaccgatctgcacgccttcactgttgatcagataatatttttctcctatttttgcaaaaaccactccgtttctggaacaaaatccccagtcgtcacacacaatatcgtcaaagccaaaatccgtcactgccttaagttccgtattgataatcgcccacttttcgccttttttcaaggctgctaatccatttaaaaacggggtggcgccgtcatattcaaatttagttacaggctgaaaatcctcattgagatatccccatttcccgtctttttttgccgggatagcgccctgattgcagactcccaggaattcatattcctcatccggctgccgccttttataattatttgtgtctatgtaataccacgttccgtccttttgaacaggcgcaaatccattttctccaaacatgcccatctgttcatactgagcgcggatcaccacgttcccctgaagatctgtaataccgagatcctctcctgattttaccagcatacaggagccgcaggcattggaaatctcatcatactcctctccaatatagtcaaatcctcctgcaagcgagttcagctttgccctgagagagccattggattcctgctgctggatctgtgcctgcaaaagcgcaatggcgtctcctttctgtcccttttccaggtaataatctgccaggatcattaccgcctgctcgccgtctccctccagattcatagcctgtgtacaggcctgtataaatccgttttcatctcccagattcttgtaagcctctgcgatcttcagatagatatccatattttccggatggtattccagagccttctgatagttaaggatcgcgtcataataaattccctttttctcatttttctgcgcttctgccagatagctctgatattccgcaggcttttgtactgcagatgaaaatgtagtccaccatgacagtcccagaagagctgccactgcaacaatcatcaattttttcataacctctccctaaaatccaattatcaaaatcaagatggttcccactgaaaaaaacggcgccagcggaatggaatccttcatggtcagtttttttcgcaaaagctgcacgatactgaatattgcagacaagctgagacacaccaccagattaaaccagatcagggagcctcccagataccagccgatcacagccacaagctttacatctcccattccaatgctctttcttgacaaaaaccaggctgccagaaaaatcaccagaccaagaccaaggccgccaaatgcagatttcagacattccttccaccatgtgggctctgctccgatctcgccgatcagaagcatggctcttgccacaagcatcataatcagaagctgattgggaatcagtgttctttttgaatctataaatcccagaacaacaagaaaggcagacaggatcagatatctcacagttttcagccagtgatatccgtaaaatgtaaacagaaacgcctctgttaccaccagtaccgcaatgatcacaggcacatattttttctcttttaacagttcttttaaatacttcataagactctccttttacgctcctgaccagactctggtagacgcgcacacacggtaatgtctgggcggcagatcaaaaaaaggaaaactgctttttatatcgtaatccaccacaattttcacctcactggagccttccctgcaccaggagctgttatcatatctgagatttgaaactccaaggctttccagatatgcatccgtatctgtggttcccgaggcaacggaaagctgctgaagcacgcaggattttcccactgtcccaaccatataggaggacagtgcatcccagctctgagattttacagagctgagcactccgttaataaattcctttggactggacacatagccctctatattgtcatatatgtcttttcctgcatttcccatgccaaccgtatcatccacagttccctgtccggatgcaagcttctgtgctgcgtcatcgatcaaagacagattttcctgaatttctttcaggctgctgccaaaaccggccgcctcctgtcctgttccctgatatgcgttcagaatacctgttttttccagaatatagctgtactgggcaacctccctggcagcctgatctgccgcatactgtatcagaagctgcgctcttgcaaaagaaaccagactgtaaatactcataaatgcaaacaaaaatatgggaataaaaagcgttgcctctacggttatggaacctttttgtctttcctttttcatcttcctctcctgttaatacgccagaacacttctgtatttgatccgcctttttccattgtccgtacttgctgactgtcccagaaactccggcacctttggcaaaaacgtagtggatgcatccacctctgcctttaatgtcaccatggtatatttactgctcagttcctctctgatattcagctgaatgcagtcccctgcacgggcaaccatcttgttttttcctgaatcgtccatcatggagatcagaagaaacagcttcatgtaatccttataagtaaacctgatacggcagacatcttcatccggccagacaagaactgcattgatgtttttgtccgtacttgtcagactggctgtgtcctgtgccgccagggtaattgcgctgcagcagagatagccgtatttgatgatcgggtacagccatgcctgcccggaagcgctgctgactgcgccggcaatggcatttgcagcagcatttgtctctttatccataaaaacatacagcatatcaatggcaagccgggctgcataaaggctggaataggcaatggatttatttgttgcagtggaagcatttccataaagaatgtattcaatctcaccatttatgatcacatggtcctccaaaagtgatcttccgctgagggatttatcttcgggaactgttgtcatgcagttaaacatttctgatatgtattccatcagatacgcctgctccagcacgttgcctgcaaggctgtccagacaggctgcgagactgtccagccatcccatattttcttttgccgcatccaccgccgcattatcgtctgaagtatctgtattggggttctgatctgtattcccgctggcgtttacctttgccagaccgctggggaatctgtcaggaaatccctctgcatcctttttcagatttctttcgttctctacagcgttaaggattttatcttttgcttcattggcaaccttttccttctcttttgcttctttctgatgttcttttcgctgtttcccctcctcagatgtatcggctgactcatccttcatattttcaagtgaactctgataaaataagcctgcctgaggattctgtaatccggaggtctcaggaactcccacatctcccagaatattatggtttgtccagaatccctggattgcctccgacgccgggttcagctcaagccatgttccttcattctcactgacctgctgttttttcagtgtctcaggtattgtttttaacttttttatattttctttatatacctttgcagcttctgtatttgcttcaagcagagcaatctggttctccagctgctcctcattgatttgtatcttttctccttccttatcttcgcctggactttcccctgcatttataagtgatgtacgggcatcgtcatataatgctcttttcttttttacatccttccatttatccctgacctttttcagctgctttaccgcctcatttcctgcgctgataatcgtatctgcattcttttccagacttttaataccatcctgatattcttttgcagcctggtcatggcttcgattcatcacagcaatattgttttttatatttttggaaatgttgttataggcattgatctgctctgaggaaaagccattctcctccgtaatgatctttcctgtctgcggctgaagctcaagagcctttatccagctgtccaaagccagaagtgttatcatctttctgtaggtgtcttccggaaatgcggaagcgccttctgtcaaaacaacagaatcatccagataatttcctatcatctcataagagatttcattgggcgtatccggcggaaaatttgcagtaatctcttcattcagatacatctgcagggattttgccgccagccagaacacagacttctgctgatatgctgccaccatccccgcagggtcggaattctgaatctgtccaatagaagcagcctgtgtatcaatggcctcttttgcctttttcattggatcactgagttcagacgccgcctgtccgtaatctgtttttgtgtccacatatattttctgtttcgttacatttttaaaaggcagtttttttaatttttctataatatcgtcagcaatataaacaggaccgcgaaatttcatatattccacgatctgctggcgcagaacattcacgtctgcaagggaagaggacgataccccttttgcctcaaagccattctctgcaagagaaacctgaatcacagagctgagatcatcactgtctgcatgcttcaggtacctggcgctgattgattcacagaacattttcttcagggcttcctgctcctggggcgaaccgggatcctttgccatagcggtcagtccataagaatccttcagcattttatcatactgtgcaagagctgcattcatagccagctcaccggctcctgaaacaactgtctttgacgcaaaaaggcgggaagcatccacaataatcccactgaacaataataccggtaccaggatcagggttaaaaacacacagatcgaccctccctgttttccgcagaataaccgcatctgcttccctcctccttctgtttcctaaaataaaatattacttaccttgtcaaaggcctgactgaacttttcagcctgcccctccattcccagcttttctaaaagaaagctgcccatatcccaggcaagatcaatgttccggacaaaatctgtagtattcattaccggctggtaggctgccgcgtaaatcgtaatgtcatctctgactcccaaaaagcgcaggattcccggcgtggggatcacatagcgcagctctgcccgcactgatttactgagaaatgaattttccagccctacataggcttctgtttttcccatggaaaacaaagcgctgtgctttttcagtgcttcctgataagcggcagccctctgctttgcttcactgtccagcccccagcgataaatgttggaggcagagcctttataggagctgtaatagttttttacctgtgattcagtggggccatcctcccagtcaaaatccactcttgtattttccataggcttatccggagtaaacttatcataccccggataagcggtctctctggcaagctccatggctgctctctctacctgaaagaaaaaatagctttcctgcattttaaacagcccaaaataaatcactgccatcacaacggcaatggtaataggaaaataaatggcggcttccaccataatagccccacgctgggtgttattgtccttttttttcattatttaaaaatcagaggcctgattcactctctacaaagctatctgcctgtcccattactttatccagtaactctgaaatcttatccttaaaaacaactgccaatgcaatcacaaccacaataatcagaataatcgccacgatctctgccgcgcctttttcctctgtcttaaaatcctcccagaaattatgaatacagttttttgctccgatccacagcatatccatttttctcatcatctcttatttcctccttatgtctgtgtactcatttataataaaccggtcttagccgtttattatcccatctgctgaaataccggaaccaggatcatgatcaggattcctataaaaatcagcatcataggaagaagaagtctggaattggctttttctcccttttgttttacttcatttttctttacctcccacatttcatcggaaaggtctttcagaaaataggcaagctcctcatttccttttttcaggttctggatgaccagagaggcaaacttcctgatctcctttacattgcagcgttctgcaaaattccggtaagcgtctgtttccatgatgccgttttcgatttccatgctggtgttctgcatttcctgatagagagctctgtctcctgtaacagacacccgcttccaagcatcccgaagtaccattccggaatttaccagaagcgtcagctttgacaacacctgaggaaggtcaagcaccagctcctgtctgcgggctgtcagcttatcctgtaaagacaaatccagataggcgattgccagtcctcccagtaataatcccagaagcaacgcctccacgctggcagcaagcacagccagaagacagacaaatatcaaaatggtaaatatataagtgctttttgctcccagcagaataaaataataatattctgcatactgtttgcctttgatctcagagatctccttgatctttgcctgggctctccggctttttgtgctgatgtggagaatctccataacagaaaatcccacacagaacagatcgctcatctgaaattctctggcaaaagcgctgtttgtatactgtctgtattttttcccttttgctgctgccagaaacagccagatcaaagcaaagggtgtggtgacagccagcagtatcaactgaaataattccacgttctcttctcctatatccgaatatcaacaatttttcttcccatataataggctcctccaaacagggcaagagctatcagcttgatcaccacattgacaggagtgttctgcacaatggacatatcgcccattccaccaagcatcagcatcagaacaaccggcatcagaatcataatgttcaggtcgtttttgtttgcagtgagaagggttcgtatttccatttctgtctcaattttttcattgatgatctgtcttgtctctcccacgacctttttcagatttcctccgtaccggtttgtcacctcaaaaatagtggcaaagctttcaatatcgtccagatgacttctcagggcaaaattcgacagcatatcgtcaatattctgtccattgtacagaccgctgaccatgagcttcagctcatgtacaatatctgctttttctccatatatggaaatcagatccgcacacgcgtcctgaaaagcgccctgtgtatttttgcctgctgaataggaggcggaaagagattccatcatatcccggaactgaaacagaagattctgcattcgtttttctttcaggtaatttctgtattttgcgattcccggaacagccagaagccctcctgcaataacagaaaacagaatactcctgaaaaataccatgcagacaaaaaagcctgccccaaatcccatcagggcccccagacctttttccacagagttcatccggtacacgtaataatcatctgcatgtccgaaaagcgccttttccggcacatatttttttctgcgttttttattttttgctctggcctcttttctgtggttttcttttttctgtcccgtctttttcatttttacaggcttttcttttattactttctctttttttaccttttcttttttcatggtttcccctatattctgctgctgactccctgaagtctcagtttatagtcatttctcagaggatttccggttcttaccagatgtccctctaccctttccagcgtgcttccctctgtttctttaaaaacaaacagcgggtttagctgaatctctccgttttcatatccaaggacttctgtgatctccatggtgcgtctggatttatctctcagcctggataagtgaatgataatatccagcgcagaagcaatctgctggcggatagccggaagaggcagtccgtcgttgccctgaagcaccatagtttccagacggcttaacatatcccgggtggagttggcatgtccggtagaaagagaaccgtcatgtccagtattcatagcctgcagcatatcaagagcctccgctccgcgcacctctcccactacgatcctttcgggacgcatacgaagagcagagcggatcagatcgcggattgagatttctcctctgcctgaagtatttgcatttcttgtttccaggcttaccagattctctatatttttgatctgaagctctgccgaatcttcaatggtgataatacgttcatcccttggaataaaattggataaagcgttcagaaacgttgtttttcccgagccggtacccccgctgataaaaatgttatattttgcccggaccagcttttccagaaaggccgccgcctctctggtgagcgagccgtattttaacagcatttccactgtcataggcgtttttgaaaactttcgtatggtaacaatgggacctgacagggaaaccggaggaagcaccacattaacacgggagccgtcgggaagtctggtatccacaataggattggcctggttcacttccttccctgcctttcccacgattttctggataatgtcctccagctgccgctcattatcaaatttcttgttcagacgatacagccgtcctgcatgttccacaaaaatatgatccggaccgttgatcatcacttcggtaatgctgtcgtctgccaggatctcatccaggatcccaagcccccgaatggaactgaataccagccgcactacccgtgatctttcctgtggtgacagactgacctttccaagcttgtgatccgccacgtcagcaattctccgcatgagctgttcatctgacgcgcggcttaaaagcatggcgtctgccaaaaggaaacgtttgatctcaagcacaagacggcttatcatttcctctgaaagcatactctcacctcatatattttattttttcgacttctgtttactctgcgtaaacagtaacctctgagatacaggtatcctcccagcttgtgcccggatacacatctttcagctccagacgcatactgtctgcatttacagatggagacacctccacccattcgactttccgttcccctgtaaaggtaacctgaccggaataatctccaaaaacaaggttcactgtcttcggctttgcatttccataataatatttgtcgtttttccagtttcccagtttaaaggcaatgtattttactttgtgaataccatcaaagctgaaacttactgattcattgattccatagcctgccacgccctcctgccaacttgtatcatcttttttgtcaaaaagcagcatggcattgttgtttgtttttgtctgagaaatggttgaggtagcatttgcagaaataacagaaacctcttttaacaaggaaacatccggtgttccctcataaagcactgctgaggcagtagcctcctctgatacactggccggagccggttccgggtgattttctgctgcctgctgttctgtgttctgaattttttcactgccctggtccggggaaagcttttcctcaccggaggctggcgctgcctcctgtgcggaatcctgcgtttttttatctgtatttgcagctccccctattttaatctccacgttttctgtctctgaactctcgtccgtttttgtttcttcacttttttctgttatttctatagaattactttcctgatcctctgtttcttctgattctcctgaaccctcagaggtttctttcatggctgttttaacgggatttactaccacatcatcctttggagcgctgtcgggttttaatagataccagatcagacctcctgttacaagtatgattgcaattgtcaccgcaatgctgacaatccatgtggtcttatttccgcctttccctccctgagatggctgattgtccggaacgaacggcgcctcccactcaaaaatatcctgctctctttcttgattaatattatcctcttcattcccttttgggatattttccgaccctacaggtgaaccgcaatttgggcagaatctggcattatcttcaagttttgttccacatttttcacaatacatgtttctctttccctgctttcctgtaccaaatatttcattttccatatttaaaacaaaatgatatggaaaacaattttgggcgctgcttctctgttatctttttacaatattcaatttgtttctacaatatgtggcattcattgtggacaatctttttttacgcttatatttcctgttttcttccagaagccacctcactgtacaagttcgggataaaaagtcctgaaactgcaaaaacggggcgacactctaaagaatatcaccccaacgcctgacaaagaacgaaaaaaacaccggttcaaatgtggttactcataaccctcatctgaatcggtgtttcccatatacttttattctgttttttcttctgaatcattttcctcagaagcttcttccttcagcgccgcttcttcagcagcctctggctcgtctgcttcttcttctgtttcctctgatgactcagcttccggagaagctttctcttcggtttcatctgcagacatctcagcttccggggaagcttcttctgtttcttctgcaggctcttcactggtttccccagcatgctctgccgcttcctcagcttcttcccatgcagcgaaagcctcatggatctcttcctctgtttcttccagttcctcttctgtgtcttcagggaattcaaattcctcaaaatcatcatcaaaatcatcaaactcgctgactctttttttcttcagtaccattgccgcaactgctccggctgctgctgccgccgctgctcctactgctacaaaaccccagtatttgtttctttttgccataatatactgctcctttcacttctgaccctctggtcattatgatatattcctaaaaataatcttattttattgtactactttttatctgtaaaagaaaggttaatattatatttgaaatttttcaatacaggttctgatttttcctcggatcctctgcagagcattatcaatggattttggtgtttttcccatgatctctgcgatctgaacataaccgtacccccggagatagtagtccagcactttattttccatggggcttaaagccctgctgatctctttttccagaatcccggtagtttccctgtcgatcaccagagcctccggattttctgaccacagaccttccagacttccgctttcctcctcttcgctgagagacacataggaattcagaggaatatgcttctgcctggtagaattttttacagcactgtacagctgtctgtctatgcacagccctgcaaaggtacgaaaagacgcttctctgtccggccggtagtcctggacagccttaaaaagcccgatcattccttcctgtatcagatcgtctgtctctcctccgatcaggtacatggctctcgctctttttttgactgttcccttatatttttccatcagataatctgagattttactttctccatttcggagtctctcaatcagttcttcgtcactgcactgcccgtaacggctcatactgcctccgttttccgtatttattctgctttcagtctctgacgcacgatttcataggcaagcactcctgctgccacagaagcattcagggaatcaatgtctcctttcattggaatagaggctgtaaaatcacaggcctctctcacaagacggctgactccctcgccttcatttccaacgatcatccctataggaccggtaagattcagcctgtacatggactctccgcccatgtctgcacacacaaaccagattcccttttccttcagctcctctatggtacgcacaagattagtcacctttgctacaggagtatagttaagggctcccgctgaggtttttgcaactgtggaagtcagtcccacagaacgtctcttgggaatgatcacaccgtgggctcctgccagattggcagtacggatgatcgcgcccagattatgaggatcctccacattgtcaagaagaaccagaaacggcggttctcccttttcctctgccttttccagaatctcctcaaccgtggaatactcataggctgccacctgagcgatcacaccctggtgggctcttgtctcactgagctgatccagccgttcctttgacacataattgataatggtatcttttttgcgcgcctctctggctatggtgcggaccggtccgtcctggcagccgtccagaataaacagtttatccacgcatcttccggaacgaaaggcttccagaaccgcgttgcggccttctatctgctcgctcataaaatttcctccccgattcccatacggatcagtgtgatcatccgtgtgtattcttccttcaaatatagataccctatcagagcctcaaatcctgttgccctgcggtaatctgccatagttgcatgctttgccatagtaggagaatgagcgttgcggcctctcctgtaaacacttaattcttccggagtcagttccttttcaatgatctccatgattcccgactgggctgccgcctttacaaggctgcttgcttttttgtgaagacggtttaccggacagttgcctttttttacaaggattgtccggatgatcagttcataaatgccgtctcctatataggccagagtcaaaggagaatagcttcggatatcctgttcctccagatgaaacagttcgttcagattacttaaattcgtttccattttactccctcgcgggtatccttaagctcgattcccatttcaagaagctgatcgcggatctcgtcggctctggcaaaatttcttgcttttcttgcatcctgacgctcctggatcagagcctcgatatcagagtcaagggcttcttcttttttcagaacgatcagtccaagaacgtcgcagagctttacaagaatatccagaagacttcctgcaaactctccgctgctcttttcatccacatttgtatttgcaaattttacaagctcgaaaactgctgccagcgcgtctgctgtgttaaagtcatcatccatggcagcttcaaatttctgctggtaaatatccgcctcttccagaagcttcttctctgcctcgctggctgcctctgtgttggaagctttgcggtcattcaggcgggctgctccctccaggatacgttccagagagttttttgcagcctccatcagctctgcgctgaaattcagcggacttctgtaatgggcattcagcataaagaatctcaggacctgcagatcatactgctggctgatctctcttactgtgcggaaatttccaagagattttgacattttacgattgtcaatgttcaggaaaccattgtgcatccagtattttgcaaagatttttccattgcagcactcgctctgggcaatctcattttcatggtgaggaaaaataagatcctctccgcctgcgtggatatcaatttcttctcccagatatttttttgacataacagagcattctatatgccaacccggacgtccgtcgcaccagggagaagtccagtaaggctctccttcttttttcggtttccacagaacaaaatccatgggatcttccttctgatcctcgccggaaacctgcagagcgcggaagcctgactgcagatcatccagatttttatgagagagcttgccatattccttaaagttttttacacggaaataaacggttccgtctgcaaccggatatgcataacctttgtcaatcagggtctggatcatttcgatcatgccatcaatctcctgagttgcctgaggatgtgtggttgcaggttttacgttcattcctgccatatcctttttgcactcttcaatatagcggcctgaaacctcttcaggacttacgccttcttcaatggcttttttgatgatcttgtcatccacatctgtaaagttggacacaaaattcacttcataacctttatattccatatagcggcgcacagtatcaaaaatgatcatgggacgcgcatttccaatatggatcagattatagacagtaggtccgcagacatacattcttacctttccctcttccaggggcacgaattcttcttttcttcgtgtcatggtattaaaaagcttcataattcctttcctccgatttctgtttttcggtaatggcagttgccctgattccggaactttaaacttcttccagaaggcagatcgcctgggaggcgattccctctcctcttccggtaaagcccagcccttcctcagtggttgccttgatattgattctgtcttcttccacgcccattgcctgaaccagatttttgcgcatctgaggaatatgaggcgccatcttcggcttctgggcaatgatcacagcgtctacatttcccacagcaaaatggtgttgtcttaagagctccataacgtgtgtcagaagctttacgctggatattcccttataagcaggatctgtatccggaaaatgctttccgatatccccaagagccgcagctcccagaagagcgtccatcacagcgtggatcagaacgtccgcatccgaatgacccagaaggcctttttcccacggaatgttcacacctccaaggatcaggtcgcgattctctgtcagtttatgtacatcatatcccattccaactctcatggtcattctcctttcacatccagaagccggctgactcttaaaaagctcagtctccttctcacataaggcgccagtctcaggctgacaggcacgatctcatcggtcagtccgatctcataaacactttttttgcagcctgccagttccatcagatgaaacagttcttcctcttccggaagttcctcgatcatctctgcgatcatttccagacagtctgccagcctggagggatttatctcacgaagaagctccggatcattttctttctgtattccttccagaaggcctttggagccgaaatatttttccagaagggcggaatcttcttcacaggctttcagctggcatcgtccctctcttatagcgcgggcaagccttttatattctctcagtacaagaagagttccaacagaaactttttcgccgtgaagggcgtccagaggtccgtttaccacttccatctcccagaggtgggaaagatgatgttccgcacaggaagcaggtctggaatttcccaccatctgcatggcaaggccggaaaggatcagtgcatacatcagcttttcacagtcctcaggctggcctgaggcaattcctttcacacagctgcagactgttttcagggctttttcttccatttctataatttcactgcagatatattcacctgtcagaagactggctatcttccagtctgcaagacagatatattttcccagaagatctgaaacgcctgacgcagtcagtcttctgggagcatgagcaaaaatatcagtatcagcaaacacagctaaaggagccactgccggtactgtttttttcagacctttccaggtcattgccgcaacatttgatacgaatccgtccacgctggccgcagtgggaacggaaataaagggaattttgtactggtaagccagatatcggctgatgtcatggatggttccgctgcctacagccaggatcaggtcaatatcctcttccatataattctccacgatctccacagcgtgttcgtctgcatgaagtccctctgcgtccagagtcagaacctgacagcggtcataaatatcttccatacattcttctgttgctttcagcgtattggtatcgcagatgagaagcggagaaatatattccttcagaaatccatctgacatggcttcctcaagcttcttaacagcaccctcttctataatgatttcctttacttctatatgatgttctctcccgcacctgcaaggtcggccaaagtcatccgtatcgactcgcatttatttttttcctcctgatttcagatatactattacagtctgatattatacatgatttccacacaaaaagaaacccccagattccctctgaggatttcccatagcttccgcttttgtctttttcacacagtcccgccggattgcgcccggccatctttttctgcgtatttcctgtcagatcttatttctcaacagctgcaatcatttccacttcgcagagaacattcttcggaagtgtttttacagccacacaggaacgtgcaggcttgtttacgaaatattttgcataaatctcattaaatgccgcaaaatcacccatatccgcaaggaaacaggttgtttttactgcgtttgcaagatctgttccggcttcctttgccacagcctccagatttttcattacctgctcagcctgagcttcaatggtatctcctgcaatctcgcctgtagccggatctaccgggatctgtccggaagtaaataatactccgtttaaaataattgcctgagaatatggtccgatcgctgccggagctttgtctgtatatactacgttcatgttcagatctcctttctttttccgttctgcttttattttatatcaaaaatttgtaagggtcaagcaaaaaaattgtattttatcaggtcccttcctttcaggagagattcagataattatagactactcctgaaatacttctgatattgtcaatggcttcgcttccgcttttaaaatcctctgacatgacacagagaatataggttgtttttggaccatacacaattgccatatcgtgctgatccgaatctgtttcacctgttttgttggctatcggaatgtccgcgctgatccctgccggaatcttggcagtatttttctggttcatcaaaagctccagcatttctgcagaggcttcctcactgacacattctccccggaaaattttttccagaaggattccgcagtccctgaccgttgtcgtattatgacctcccagattcagcttcggagatgaagacgggtgcagagtactctgataggaagtattttcatatccctcttttttcagatattcatttaccttttctgctccgtcaagaaaatcatgtttttccgactgcagtcttccgagttcattacaggactcattatcgctgactgtgatcatgttccagagaagatcgtccacttttctttctgctgccgcacggtctgccttcataaacgtttcctgatgtgtcagcacatcttccatattttcataggtttctgccatcacaaaggctttaattaaactggcagagtacaaaggcgtttcattcagaaggatttcttcacctgtattcagattttttacatagacgctccagactccgtcgtattcggggatcatggactcaagccggggctctaaggtatccattccaagattctcaatatctgaaacctttcctgtgtcatctacagggaagccctccggagtggtcccttctgcctggaccagaacaccgttttcacctccgaaatagtaagttcctgaaaatttctgaccgttggatgtcatctctatttcatgatatccgggagttgtgatcatccgtccgttttcatcaaaaaaataatatccttcataggaagtcttatccaccgtcagcccggtcatatatctgacctgaggcgccgcagtaagctttcccagattatttaccatatacagcccgtcaaagccggtctccgtctttgttccgtcattgcccggaaccaagcaggtgagctctttcatctggacaatgtggggatttccggcttcaaaatgccctgactggtcatgataataaaaaccgtccagaactgttccgtcgatttccatatggtcaaagtaatgaaccgctgattcctcatgtctggttccgtcttccttcagacagtaaaatccctcactttttaaaagataggtttccgccccgtctccaacaggctttatctgcgcctcgcctactgaggacaaaatactttctgactcctgctctgctgcatatacgggcattgtcagtcccagggacagacagagaatgccggcggtcattccacgccgaaaaaatattccaggcataattttttatggtctgatcagattttcaggatcagacgttcctttctcccagaatttaccggggtattccatacttatcccaatcagcagtattttaccgctgcattttttacagtatacctgaatctcattggatgtcaagcacattacgtttccagaagtcttttaatatgctttccacattccccattctgcagatatgcacatcgttccattcttccggaaaaaggatgcggtactcggtacttctgaatctttcgtccataagaaggatgcagcctacatcctcctttgtgcgtatcactctgccggctgcctgcagcaccttattcatgccgggaaaacggtacgcataatcaaaaccattttctcccagcctgtcataatgcttttttaaaacctccctctctgtatttacctgaggaaggcctgtgcccacaatggctgccccgatcaggcggtctcccataaggtcgatcccctctgaaaaaatccctcccataatacaaaagcctacaagcgtggtttctccctgttctttaaattcttccagaaattcctccctgtctctctcattcatggacggggtctggcacacacatgttacccagtctgctgcaaattcctgttcatacacctgctttacatcctcaagaagcttataagaaggaaagaataccatgtaattgccttttttctgccaggccatccttgcaatatattctgcgatcctgcggtattcctcatagcctcttctggtatatcggctgcttacatccacacaggtaagaatacaccgtttctctggatcaaaaggagaacgtacataaatgccatagtcatcttctcttgtactgagaagcttcctgtaatattgcatgggaagcagggtagctgaaaaaaacactgtactttttcctttgttcagacattcctgaaggtttgaagcaggatttacacagaaaagccgtatcctgaattttccgtcttctccctctgaggtatagatctcataattctcatccacaagctctgagatattcaggaaatcccgcacctgaaagtaaaaatcaaggattctgtccacaacctcctgagaaggcggctcttccagcagcctgtccatttctccctgagcctgaagcagagtcaggggcagggtgcctgtgctttccaggattctttctgtttctccctctttttttatttcaagaagctgtctggcagcccgtcccaaagcccggtaaagccgcggactgtagggttttatatacttcctgatttccataacatcttctctggcaagacaggcgctgtacatttccctgccccgctctgccagattatgagcttcatcaataagaaaaatatagtctccggatactccgtctccaaaaaaacgtttcagttttacattggggtcaaacacataattatagtcgcagatgaccccatccacccaggagctgagatccaggcacatctcaaaagggcacaccttccacttttctgcctgttccaggatcttttcgcggctgaaggactgttcggcagtccacagttcataaaccgcatcattcactctgtcaaaatgaccttttgcccagggacatttctcaggcgtacactcggttttttcgcaaaaacacagcttttcctttgcagtgatggtcaccgtctgaaaaagaaggccttttgtcctcagaatctcaaaggcatcctgagcaacggttctggtaatagtttttgccgtaagataaaagagcagctccccttttccctctccaattgcccgcacagaaggaaatacagaggacatggtttttcccactcctgtaggcgcctgtacaaaaatctgttttttgctggaaacagcatgataaacgccggcaaccatttctctctggcctttgcggtaaggaaaggggaattccagatttttcatggaggcgtttcttttttcctgccatttcagcctgaaggatacccatttatgatattctcctgtaagtttctgataccaggcttccagctcttctctggaaaaaaattcccggaaccgtcggatttcttctgtatccagatgggcatacgtcatctgaacgtctattttttccagatcgttctgaagcatatagatccaggcataacacatggcctgagccctgtgaacctccacagggctttccagatgctccagttttttgtaaacgcctttgatctcatcaatacacacggtttcttcttctgtaaaaataccgtccgctcttccctctacccgaaggatcagatcctcatattccgtgtcctgcttcagagaaacctcaggccggtagctgcttcccatctgcttttgaattttgcggtggatacggctgcccttctgcattgcctccttatcctgtacgccgcttccgctgtccagatctccgcttcgcagaataaattccacaagattacggacagaaatgcggactactttcttttccattatttttctacttcccccaaaatctcccattaataaatataagtccttccacttctgaaaaggcgcatacctgtttccaggttatgcgcctttgacacttgtaatcgtttatgcaactgcaaattttgcaatgacttcattgaaatgagtgttttccccatagcatctgacagtgagctttctggtcagatccatactgagaattcccagaagggattttgcgtcaattataatcctgttatatgaaatatcaatgtcaaaatcacatttacttgccgcattaacgaattcctttacatcctctgtggcatttaacataatctgatgttctttcatttgtctcatcctcctaatgttttctgcactaggcgatattttgtcactctgtaaagtatttgtcaacagacttcaaattttcttcatatttttcgacttattatacaattttttcatgtgttttattatttttcaggtactttttctagctgaattccggcatatttgaacgaaattttaatggaacaaactgcctctgaagaccgggatttttcctttccggtatggtaatatggctgcagaaggccttccagagattctcatactcatctgactgcaccggatccgtctcttgtgtatttaatactgcctgtatataaaccgtacattctccgccatgctcatgagccagaaccttctgcctttttttgtcatagatcatccagttttcatttggaaaacgatctgaaaaatggggcgccagaagttccaggatgtcattttccggctggatttccgaaaaaagtactccgctgccaatctcacggaaccgtacaaatccataaaatctgtgaatctcatgccataccttgacctgaagtgaagagacaagactcaccgccggatctgccagagcttccagtacccgcgtatcaatccttcccttttccagcgctctgcgaagcaaataaaaaattgccgttcccttttccggatgaacagatgccgcagcatagcacactgcttcataaacctgtccgccaagcctgttttttatcgttctggcaaccttaaatgccttgacggaatctgagatgatctccaggttttccgtaaaaagctccggataatccggctctctgacagcaatccccacggaaaatcctctgtttccccagcgccagccgtcataaacagccgtaaagattccttccatcgtatcgtcacagatcagcattttctttttatattccacaaacgctcaccccttccattcccggaacagccagatctgcgtcaaacagcgacagctgtctgtaggtaatccccgtatctgcaggatattttccggttcctgtttccagaatatttcttactatataatcctcatccagctttaccggatacatctgccttccattgcaggtaataaaatatactgccctcttcagcaccactccgatctttttcaaatcagaaaaatccagcgtatgatatctccttgctcccagaatccttctggcagatttctcgccgattccgggaacccggagaagcgtccggtaatctgcccggttgatctccacaggaaaacattccagatgactgatggcccagtcgcatttgggatccaggaacagattaaagttcggatgcttttctgacaaaagctcttctgcccggaagccataaaacctgaggagccagtctgcctgatacagccggtgttctcttaaaagcggcggcccctgtggaagaacaggaagatctttatcttcattcacagatacaaaagcagaataaaatacacgcttcagagaaaactgcctgtacagcgcctctgccacagagacgatctggtagtcactttctcctgctgcccctacgatcatctgagtgctctgcccggcaggcacaaattccggagcatgccggtaaagcaccagctcctgtctgttttcttcccttctgttccggatctgtttcatgggacggagaatcgtagtcctgcttttatggggagccagctttttcagtccctctgcagtaggaagttccaggttcacactcatacggtccgccagataacctgctttttggatcagctccggtgaagcccccggaattgctttcaggtgaatatacccctgaaaatgatattgtttccttaaaatttccacagagcgaatcagctcttccatggtagcatccggagaaccctttactccggagcttaaaaacagaccttcaatataatttcttctgtaaaattctatggtgagcctgctgatttcttccggggtaaagcttgcccgcaccacatcattggaagcgcggttcacgcagtatttacagtcaaatacacactcgttggtataaaggactttcagaaggctgatgcaccttccgtctcctgcaaagctgtggcagatgcctgctgaaatgctgtttccgatccctgtcccgtccccttttcttgcagttccgctggaggtacaggcaacatcatatttcgctgcatctgccagtattcccagcttttccattactgtcattgactcctgaataaccatatgggcctcccaaacatttatttgtgattattttaatccaaacagacgtttgtgtcaatccaataaaacgggatgaactaaaaaaattccagaacaaatctggaattttttattacataattatttcattttaaagctgtgtttccacaaagatatcatagatcgcttttacagcagtctcaaaatcgcggttctcaacgcctatgataatattcagctcactggatccctgatcgatcatttttacgtttacgtgagcatgagccagggctgcaaatactcggcctgcagttcccctctgagatttcattccccgtcccacgacagcgatcagagcaaggtctgattccatttccacaaagtcaggctgtacggctctgtgaatgcctgcgatcacctgctgctccttctcttcaaattcatcctgatgcacataaactgtcatggtatcaattccggagggaacatgttcaaaattaattccctgatcttcaaaaacctgaaggatctttcttccgaagcctacctcgctgttcatcatggatttttcgatgttaatagaacagaacccttttttgcctgcaattcctgtgatcacatatcttggcttgcggcaggtgctttccacaataaaggttcccttgtcctgaggacggtttgtatttctgatattgatgggaatcccctctttccttacagggaaaatggcttcctcatgaagtactgtcgcgcccatataggaaagttcgcgaagctctctgtaagtaatcgtttcgattacagccggattctccacaatcctgggatctgttaccaggaaaccggaaacatctgtccagttctcataaatatccgcatggactgctcttgccaccagagaaccggtcacatcagaccctcctctggaaaatgtctgaacgcttccgtcttcctttgccccataaaatcccggaatcactgcgcgctcacatttagaaagacgtttgccaagaagacggtctgttttctccccgtcaaagttgccgtttttatcaaaacggatcacagatgcagcgtcaacaaactcatatccaagatacgctgccataatttttccgtttaaaaactcacctctggaagctgcgtagtctgtgcctgcctgcgctctgaaatctgcttctatctgagcaaactcttcctccagggaaagcttaagatcaagacctctgatgatctcataatagcgctctttgatctcctgaaagattccgccgaactctttcccctgggcagctctgtcataacatgcatacagaaggtctgttacctttgtatcaccggaaaatctttttccgggcgcagacggtaccacataacgtctgccttcctcactgcggataatgtctccgactttacggaactgctctgcatttgccagagaacttcctccgaattttaccacttttttcataatacttcctctcacccttcttcatttaatagctgtatccaaaaaacgcagcataatagaaaatctgacttttattttattgaaaaaggaagatttttgcaagtatttctttgattttatcgaaaatataatgatatactcaagtatagctgcattaccgcccgtcactgtttacatgtaatgatcctgcaaggcgtctcggcataaaaatcccagaatcccgaaacatacagggcaaaatgacaccaccgaaaatgatccggaatgcatttcggtcaggttgcctcaaacgtaaggaacagcctccgtttacgcgcaatattccttcatgatattttccagcgcagacgcactgctggtatggcatctgcatacggggatagattttctctttgcctcttccaccgcacagttgaccattttgtgagatactgtgtttgtaaaaagaatcagaagatccggcgctccgattttctttttcatagtacctttttcttttgcaaaaacttttgccttacatccatatcctttgcagatattttcatactgacataccatacgctcattaccgcccacaatcacaacactcatatcccgctctcctttgttatttataactaacttaaagttaaaaatttgagttagcacttgctaactcgttgtaaacatcttatcacaggattttttatttgtcaaaagatttttgttcttttttatactctgtcacctcacagactgtcagaaccctttcttttacatgaaattttatatttttgcttccataagaaagcccatagatcctgttgggatcctcctgatagcccggtctgggatcgttttccagaacctctgtaagagccgctctctgttcctctggaattttctccagaagctcctccggaaactctacggcaagtctgctcctttcaatctgatcggtaaatcctcccgctgcgccgggatgactttccacataaggaaggtacggtttaatatcaaaaacaggagtgccgtccataaggtctgcgcccgatacatgaagtatgattcccagtcttggatgctgctccaccttttcaagccggacgcaggacagccccagatgatttgggcgaaagggggatctggtggcaaaaacacctttccgcacatttcctcccagtctgggaggacgtactgtagaggaccagcctttttccactgcctctgaaaactgccagatcagccagatataatcatactcctcaattccgcggaaggcttccggcctcctgtattccggctcaaaaataatctgagccttctgctttttcagccatccgctctgatgaggaacaccaaatttttccggaaagtcattgtggatccgcgcaatgatctgcagactgtgttcagattttggcattatttcagacattatttcccctcccacaaaattttaccggtcaatcacttctaccggagtatcatcttttttatcaagatcatttatgtatttttttgtttcttttacaattacattggataaaagaagtaccgccaccaggttgggaattgccataagcgcattcagaatatccgcaactgtccataccagattcagtgaaactaccggggccactgccgcaacaataatataaaccactctgtatggaatcagtcccgcttttccggcaaaatattccacacacctctctccgtaataggcccacccgagaacggttgaatacgcaaagcaaataattcccacaaccaggataaaggggcccagtaccggaatctgctgaaatgccaaagtggtaaggattcctccgtccgtaatatttgacatatcaatggacggatttttcataatactggtcacaaggaccagacctgtcatcagacagactacaactgtatcccagaaggttcctgtgctggatacaagagcctggcgcaccgggtttcttgtctgcgctgctgcggcggcaataggcgcggagccaaggcctgattcattggaaaaaagtcctctggcgattccatactgcattgccatcatgatccctcttccaaccagtcctcctgcagcagctcccggagtaaaggcaagcctgcagatggttttgattgccggaatgataaaatcaaaattcagtcccagaatgatcacacagcccaggatataaaaagctgccataaaaggaaccagtttttcacatacatttgcaatggagcggattcccccgaaaataaccagcgctgtcaaagctgcgactacgattcccaccagcgccggagcaatatgcagattttcctcacagacagtggcaatggcatttacctgtgtggcgcagccgattccaaaagaagcgaagcctgccagaaacgcaaagatcattcccagccacttcatgttcaatccgcgttccagagcatacatggctcccccctgcattcttccgtcctttgtcttcacacgatatttcactgcgatcagagattcactgtatttggttgctatcccaaaaacaccggtgatccagcaccagaaaacagcaccgggtcctcccagagccacagcggttcccacaccgataatatttcctgtgccaatggtagacgccagtgcggtggtcagagcgccgaactgactgacctctccttctgcgtccggatcttttgtcacagacagtctgattgcctttccaatcttcctctgtataaatcctgtccgtactgtcataaaaatatgagttccaagaaacagaaggatcatccaccatccccaaaccatcttgtcgatctgattgatcacatttactatcgtatcaaacataaaaatctcctttttcttttttaacgcctttcttttatatctgcccttcctgctgcatccatgctttcagtgcactgagattccttttggcatctttttttcccagttcatatacctcctgaattttttccagatcactttccatccttcccacggtcagtcttcggctaggccggatcacaaaagcctctccggatttttccatagcgcggatatcttccagggtctgattatataccttatgcctgttcttcagggcgtccacaaatctgggatatcggtgataataaatttctgccagttttaccatttccggctcttttacaaaaccttcttctctggtaagtaccaccacattccttttataccccattctctggaactggctgaccggaatactgtctgtacagcccccgtccagaagctttctgccttcccagtcaacaatccgtgatacatagggcatggatgccgaagccctcatcacatctacctgattcagcatatctgtaattctgatatattctgcctttccggtttccagattggtgcacactgcataaaacgctgtatccgatttaaaaaaagcttcataatcataaggatccagacgctccggaatctcatgataacagaactgttttcccacgacttcccctgtgtgtaccagactccacagactcataaaatgtttgtcattcctgtattttttataataccggatacttcttcccttctggcctgacacaaaggaacagccatggagcgcccctgcagaaactccgatcactccgtcgaaatgaatctgattttccagaaacacatccagaacccctgccgtataaatccccctcattgctccgccttccaaaacaagtcctgttttcatctgacgcctcgcctttctcttatccagtaatccctgatccgttcccatgcttctctgtagcttatatgattttctgttgcaaaagctgccgcactttcatattccggataacatcttctgcttccgtccggaagtgtgcagatttttactgtcaccactgcctcaggcatggaaagcttttgaatctctctttttagaactgaacgttccatccggcttctccgaataccaatggtagtggtctgtcggaaaagaatttcttccagagcaaaaatgtcctgttctgcacagatcactgacagaatccatgccgggcggttttttttcatataagccggcatataatacacgtctctggctcccgctccaaaaagaagattcattacgtttccaagttcctctccggtacagtcgtccacatttgtttccagtttccagatcacatccttctgcacctgatcctcttttttcttttccggagtgatcagcattgcccttaaaattcccggacatgcatatttccgtttgcctgccccgattccggttttatccactgtgaatttttccggaagacagtctgatgtttttatggctgccacaatagctgccccggtaggcgttaccagttccccctcaatgtccgtgatctttaaagtaagccggttctgctgcacaatattcacaactgcaggcaccggcaccggaagtgttccgtgctgacagcgtacaaaacctgttccctcacagagctttggcacgatcacttccgtaatgtccagatcatccaggcacactgctgccgctgcaatatccactatggaatccactgctcctacctcatgaaaatgcacctgttcctctgatactccgtgagcttttgcctctgcctttgccagaatctgaaaaatatgaagcgcagtctcctttgcccggtctgtcatctctgaattcagaagaatctcgcggatttctttcattcctctgtgttcatgaatatgcccatggtcatgtcctgattccccggtatggaaacttctgtgcccgtgggctgttttttccgtatgcaaatcttccattccacgatccggttcttctgtataaaaaggttcctcctcatgacccggttcttctgtgtgagcatgtcccttcccataatcagattcttctgtgcaaaaatgtccgttagctgtctctgtacagtcatgtacatgtgtatgctcttctgtatggacatgatgagcctgctctatgctgtgaccatgaagatattccatatcatggtcatgattctcatggtttttatccaatatcacagaaaaatcacaggcatccagcccggactttttcacccgggtgatctctgtacgaaatccgtcagcccggatactggaaagcgctttttccagcaccttctgatctgctcccaggtcaagaagcgctgcaaccgtcatatccccgctgattccggaataacattccagatataatgtccttcccataaatctctcctttatttttctctgaaaccaagtctgttgatctgcgttgctatatagccagccccatagccattatcaatattgaccactgcaattccattggcgcaggaattgatcattgtcagaagggctgaaagtccatgcatacttgctccgtagcctacagaagtaggaactgcgatcaccggtttatctaccagtcctcccagcacgctggcaagggcgccttccataccggcaacagcaatcacacagtttgcctcctggatcacatcaagtctggaaaaaagtctgtggatcccgctgactcctacatcatagatcctttctacttctgagccaaaatattctgcagtctgggcagcttcttcagccaccggaatatcagcggttccggcagtacatactgcaatctttcccacgtgttcctttttttctttttctatcttgatgatatgtgagatttcatcatattccgtctgaggaaacagttcctttaccagttcatactgatgcctggacgctcttgttccaaaaacctcaccgttttcctcatacagttttttaaatatttgcgtaaaatgaacgtctgcctttccgctgcagaaaatcacctccggaaatccgcttcgaatctctctgtgagaatccagcttcgcataatccatttcctcaaaaggctgctttcgaaaataatgctctgcctcctccagcgtaatctcattttgtttaaattttgtcagtacctctcttgcttccatttttatctcaccttaactcccgctttatccctgtcagtttctgtaaatcccgtcttttaaaaagcctgtttctgaataaacagtgcctgattttgctgcaaaataaaaacaggaaagccgcccggctagtgccacgcacctacttccggcattctccctgttatcttcgtttcccgaataactccggcttcaccccggtacagtattacagaaataactatagcatatttcccttccaaattaaatagttttttatattcctcagactgttgtttccgcaggcaaaaggcagcgcagacagcaacttatttcttgacagtttacctgaaatatgctatctttctcattaataaacagaaaggatgtgaattttgcgtggaagacaattccgatgaaaatcatactacaaatattacggattcccgcattgtcattatgtatatatagaggtatagcttgtgagcatgcttacaggctatacctttttgtcattttatactgcctgcaggcagatttacttattaacttacagaagggaattaaaatttaatcatgataggatctgttatactcattattgtttttacatttttgaatgcagttttcgccagcgcggaaatcgccgttatctccatgaatgaagccaaactcaggcatctggtagatgacggcaacaaacgggcaaaaaagctttctctccttacagaacagccggcccgatttcttgccaccattcaggttgccataactctgtccggatttctcaacagtgcgtttgcatctgacaactttgcaggtgtgatcgtagatgccctgatctctgtgggtgttccggttcccagagcaaccctgaactctattgcggttattatcattaccattgttctttcctatatcagcattgtattcggcgaactggtaccgaaacggattgccatgaaaaactccgaggctctttcccttggacttgcccctaccctttatggagtctccaaggtcttttcgcctctggtgtctctgctgacaggatctaccaacctgatcctgaagcttatgggcatcaatcctgccgaagatgacgaacaggtaacaaaggaagaaatccagatgatgcttatggagggaaatgcccagggtgtcattgatacacaggaaaacgaatttatccagaatatttttgattttcatgatattactgcggaacaggtctgcacacaccgtacggatgtaattgtcctggacacagaggattctcttgatgaatggaaaaatatcatttatcagaatcgccacagctactatccggtctgtcaggaaaccaaagaaaatatcatcggtatcctggataccaaagcctatttctgtctggatgaacgcaccagagaaaacattctgacaaaagccgtaaagcctgcttatttcattccggaaagcatgaaagcagcaaagctttttgatcacatgaagcagtcccggaattactttgcagttcttcttgatgaatatggcgaaatgtccggtatcgctactctccacgacctgattgaagagctggtaggcgatatttatgaagaaaacgaggagaatccggaaaaaatacagcagatttctccaaattcatggctggtccggggcgatgtggaaatggatgatgtggctgatacccttcaccttactcttccggagggcgactatgacacctttaatggttttatctacagtattattgacagtattccggaggacggcagccagtttacctgtgaaagcaacggcatgatcatccatgtaaaatccgttgccaagcataaaatcgcagaggctgttgtagaactgccggaaactaaaaaagaatcagatgaggaaaattaaataatttataatggaaaaaagggggctatcggttaatatcgatttttcacttaaatcttaaaatacgaatcttccgtagaaatcagtatttttaacgatagccctaaaaaatgagataccctgtaaaaaatacagagtatctcatttttttatggcaaggctcaaaatttagaatttatgaaatcatttgaaaatgccttagtgcatcttctatagcttcttccttttctgcggtaacttgtggcactcttgtttttccttcccccagattataattgattctttcaataattccatattttctttttacctgtgctatgtataggtttgttacattcattccgtaatttttcaatacatactctttaatctcttcataggtagccttactctctgcccttgataaatccatttcatcaagattgatttcaacctcaatatgcggtgttgactttagcttggacaataaaacgcacgtctccacatgtgtggagtttctgaacccagtaaccgaaaagcagattttcctcttggcgggaagctgttttgtcctgccagttctttaattcgccttttcaaaacaaagttctctgtaatactctacactgtgtcagccagctctacaatgacgtattgctaacaataaaactcttgaagataaatctgcaagaattttagtcttagtaataccacatccgtcttaccatacttccattcttaaataataccacaatttcatttgatgtgattgcccaaatgcgatctacatacaggcttaccagttcatcttcgtatttcttatattttgaatatcctttgattggcctgaatcgagaagcaatccacttatctgtattatttttcaaaagtaattgacatagcttttccgccaattcatagtacgcattcatttctcttgcgtaatattccatcaaattctcctttgcccaaaatccctgcacattttcatggagtgccttttcgattgcctttttatgattcagcatctgttgtgcaatgcttctttgctcttttatgtccggatggtcaggaacggggagagcttgcttcatgacagcgtatgcgttccatacttccgtatgcagcgccttctctgaaatcgtgtatcctgttcgacacactcgaccggcattttttatatagctgccacatttccatacaatatctctgttcccggcaactcttcttgttacccgcatataggtactcccgcaatcatagcataacagttttcctgtgagtgcatattgagtgacttttcctttcaattgtctcttaacataactgcgccacaatctttgttcttggaccccgtagaatacttcttttgaaataatcgccggatgattgtcctccacaaagtatttgggaagtgtcccattatttcttaccctttgctttgtcaaaaaatctgttgtgtaggttttttgcatcaatgcggcaccaatgtatttctcattggaaatcattttatcgataacggttggttgccatacggttttacccattacggttcttctttgatgttgttccagatattttttaatctgaacaccactgcagccgattaggtacagtcggaaaatttcttgaacaaccgccgcttcctccggaacaggctgcagttttccgtccggaccttttgtatatcccataaagtggttgtagttaatagtgggttcgcctttttcatacttgcttctcaaactccagcgaatattttcgctgatattccgactttcctcctgcgcctgactgctcagtatcgtgataagaatttcaccggtgctttccagcgtattgatattttctttttcaaaatacaccgcaatatttttgcttttcaaattccgtattgttgtaagaagatccacggtgtttctcgcgaaacgactgatggatttggtaaggagcagatctattttaccggcttcgcagtcctgtaacaatcgcaaaaaaccgtctcgctttttctttaccgtgccgcttgtgccttcatcagcgtaaacaccggccaatatccaaccttctctcttttcaatcatcgcctgatagtaggttatctgccttgcatgtactctagttataatattttcttaagcacatacagtaacgcatcaatatgctctttctctaaaatcaaaggaggcaacaggcgaatcacatgtgaacctgaaggaattacgataattcccgcttcttgtaaagcatttatatagtatgcggcaggtacagacagttcaattcctttcataagccccagtccgcgcacctctttgatcacaactttttgagcggccaattcggacaatgccttatctaaataggtcgtcatagccctgacattcgccaatatgttatactgttgataaagctggaatacagcagtaacggctgcagcggccagaggattggagccgtaagttgtgccatgatctcctgcacacaatacaccggttgctgcccctctggttccaattgcacctaccggaattccgcatcccaaagcctttgccgaaaccacaatgtcgggagcaacgtggtacagctgatacgcaaacatatttccgcttctgcccataccacattgaatctcatccaaaaccatcaaaattttgttctcatcgcaaagctttcggactcctttgataaagtactcagtggtaggataaattccgctctcaccttgtactgtttccataaaaattgcacaggtattttttgtaatcaggcgtttaacgctgtccagatcattgaaatcggcaaatttaacatgagcaagcataggagcaaaaggttcctgataggttgctttccctgttatggataacgcccccatagatctgccgtgaaaggattttttcatggcaatgatctctccattatgattattatgcttcaaaaaatgatatttcttagcaattttaaccgcaccttcgattgcttccgttccagaattggtgaaaaacacctgctccatgccagatgcctgattgaacagctttgcagcttcaatcgcaggaacattataaaaaagattagaggtgtgtagcagcttctccatctgttcttgcagtgtacatgtgtaattcggatcgtgatatcccaaagcacacacaccgattccagacccgaaatccaaataccgttttccctctgtatcataaaggtacataccttcgccatgatcccatacaatgggataacgattatatacaggaacaaactgctgatttgcttgtttgatataaggattcatttcagttcttttcctcctctacttcaattttaaatacattgattacatccacatctggacagcagaatacaatggagccatctggttggctggggagttttcccccataccgcagaatgtcaatgtaagggaaagccacgtgcatggccattgggcagagagcgcctctttcggtatcaaagtcaaaggtatctccaattcgatgaccacgatggcaccccatgtgccccttttgatctattaaactgattttaattttaggctttttcatcgttaatttcctccaaaaattgttcaatgggaattcccttgtatttgtcagtatcatgtagattagcataaataattttttcgagttgtctcattgtactttgtacgctctccaaaatctgacctaattttaaataatgccctactacaatcgccataaaaatatcccctgtacctggaaaacgcaccggtatttcttcataaggaagcaagatacacgaatttttcggagaactttttacaacagtaaacattcttccattgatatttgcgcttgtaatcacaacggatttggcaccaagcgtatgtagtcgatttgcgattacttcaatttccggttcagagtaagtgtgtttaactgtgtattcggataaaaagcacgcctccgtaatattggggacaatcacatctgcaatagaacacaaccgtttcatgtaagtgactacttgatttgttacaccattgtatcgttttccgtcatctcccataattggatcaacaaaaatcgaagtacctgatttttgttgttccttacagtattcatatacaagagatgactgcctttccgacacaataaatccagtacagattgcatcgaaagaaaacattagtttcttccataccagaagcgtattttccatatattctgttgtatccagaatatcaaactgaccataatccagagtgttggaaacaagtgcagtaggcaaattgaaagtttcaaatctcaagtgagacaaaacaggaatcatgacagataaggcgaccttgccataacctgccatatcattgatcaataaaatttgagtttgctttttatctgccatagccatatttcctcagtgaccgaaataacaaagtctgcacagtgtttttcctgactctgtttgaaaaatcttctgtaatgtggtttctattatattttttcccagattatcttcataaaaatttaccaaaaaatctgcttccacaagaatctgatagtcaataccctctatatctacgtaggtatgatggtgtcctactaaatagcagattcgattgatgtctgcttcctcaaatcccagctctcccaacattttgcgggcataaaaaggaccttcttgctcctgtaatctcccattggacatcccatacttttcttctgccggccgaataccaatatcatgaaccaatgcggcgcattcggtcaaaaactgactatgcccatccaactgttccatacgaccaatcatctgtgcaaaactgtgaacttttatcaaatgatgaatgcgttgtggatcattctgattaaaacgaatcatcttctgcattaacatatcaattatattttcctgatacataataccctcctattccatttcttttttcaaacaaagtgccagcaattcctttcctccatctgtttgaaaaattttctttatatactctgcttttttatgatctggccggttttcatagcagtttacaattaaatcggcttccatcaaaagttgcaatagtttatttttaggcttgtcataatcatgatggcaattcaccagttcaatgattttcggaacatacgacggaagataattggccgattctaaaaagcgagtcacaaggatagataccacctgtttctggttgttctgactagcatccccgttataatgttctttgcaatatttaattgctacatcatgtaaaatggctgctgcttgcaaaatttgctgatcttcaacagagattttttcttgctcaccaaacagcttggctaatgcataaaccttaaggatatgttgcgtacgtctacaatgtccttcttcatagcacaatacactgtataaaagatgggtttcattattaatcacgttgacaagtatcctttcttgaaaaatttttatatctctttataagaataaagcatttttcatcagttctgtgttgcgcttgcaacacctaccacaaaatgctatactttatctcagaagaaaggagagacaatatgcaacttaatttcaaacaacttgcttcgctcccaatcttcaatggtatttgtgaagaggatcttccagccatgttgaattgtttgggaagcttccaaaaaaattatcaaaaagatgaaattatccttttggaaagtaatgaggttcgaagtgttggcattatattgtctggcatcgtccatatggttaaggaagattcagaaggctaccagacactccttgtagcaatgaaagatggtgagctttttggggaatctttttcttgtggaagccatttaaatgcacatgttagttttttcgcagctgcaccctgtacagttctatttttacctttccataaaattattcactcatgtaaaatgagctgtacctttcatcatcggttgattgaaaatatggttcaactgataggagacaaaaatgttcagctgatgcacaaaattgaagtaatctcgaaaaaaactctacgagaaaaaattcttacatatttacagcaacaagcccttgatcaagatagcaggcaatttaccatccccttaagtcgacttgaattggctaaatatctatgtgccgaccgcagcgcgttaactcgagaactatcttatatgcaaaaggatggactgatttcttatgaaaaaaacacattccaactgttataattgaatactacaagctccccattaaataatctacagcatcaaacaaagaagaatccatgttgcacacgcaacatggattcttctttgtttgtgttacactccttatagtcatcatgtagttatttaagtataaggaggaaaatatatgggctttcatattactgatatgcaactgaatgtattatttcagacatggcaaacaaattaccatatctatgctccccgcaacttttctggcggcggacgcttttctgatacagattgtatccgttatggaaaaattgaacatgctgacgaaatcgtgttcgacaaaaaatctgattattccttcaaggaagtgctgacacccgtttctcaaaccctgttcttctttacggaagggcaaaccaaagaagccgattttccccaaaaaggcgcagtcattttcttgcgtagctgcgacctatatgctcttaagcggctggacgatatgtacctacacaacagtccagcagattattactatcagcatctgcgggataacattaagattgtgctgatgggctgtgaacattcctttgaaaattgcttctgcgtcagtatgggaaccaatgtaagcactaaatatgatatgagcatcgaccgccagcctgacggcacctatctggtggactgtaaggatgaggcatgggtgaaacagttagtacaagctggatgtgaacagcaggaagtcatccctgctcatgtcactgaaaaccaagttacagttcaagtccctgaaaatctgaccgcagaggtggccaaaagtactatgtgggaggaatacaatagccgctgcatcaactgtggacgttgcaattttgtctgtcctacctgtacctgctttactatgcaggatctcttttatagtgagaatggcaaggttggagagcgccgtcgtatctgggcctcctgtatggtagatggctttaccgatgtggccggtggcggcagttatcggaaaaaaaacggagaacggatgcggttcaagctactgcacaaggtactggactacaaacaacgcaatggctatcacatgtgtgtgggttgcggacgatgcgacgatatctgtccggagtatatctcattttcaggttgcatcaacaaattgcagagtgctatgacggaggtgactgaacaatgatgaaaaatgattatattcctttcccatccaaaattttggaagtaattcggcacacaaaaattgagtatacgttccgtatggagtttcaaggagatgttaagccgggacagttttttgaagtgtcgattcctaaatatggagaagctcctatatcagtcagtggtattggagacaacttcgtagatctaaccattcgtcgagtgggcaaggttaccaatgaagtttttgaacattatgtgggtgatactcttttgctgcgtggtccctatgggaatggattcgatgtatcagactatgcaggtaaggacatcatcgtcatggctggcggaactggtctatcgcctgttcgaggagtggtggattactttttcaatcatccagagcagcgggggcatatgactctgattgtaggcttcaaaacgtcgcatgacattcttttccgcaacgatctgaagctctggaaaaaaaacatggacatcatccttacggtagattgtgcagaagaggatgttgcctgtcatgtgggccttgttactcagtacatccctcaaatcaaactggataatgtgcagaacacagtggctgttgtagtagggcctcctgccatgatgcgcttttccgtgcagggattactggatattggacttccagaagaaaatgtctggatttctcaggaacggaaaatgtgctgcggtctgggcaagtgcggtcactgtaagattggggacacctatgtttgcctggacggtccagtatttaactataccaaagggaaatttttagtagattaaggaggggtaacatggatatcaacacaaaaatactaaaaaagaatgcgtttcgtgtcactaaagaacgtggtatgactgcttccagaatccgtgttcccggtggtcatctggatgccaaatatctgagccaaattcagcatattgcagaaactttcggaaatggcacagttcatattaccagccgacagggatttgagattcctggtattccttttgaaaagatgccagaggttaatgctgcccttcaaagcctgattgacggtttggagatcaatcaggatgaagtgggctgcggctatcctgctgctggaacccgaaatatcaccgcttgcgtgggcaaccgtgtctgtccattcgcctgttatgataccactgcgcttgcccagcgtattgaaaaagctgttttccccaacgatctccactttaagattgctctgactggttgccccaatgattgtgccaaagtacgtatgcatgactttggcatcatgggtatgacagtacctcatcttgagtctgatcgttgtgttagctgcggggcctgtgtaaaagcctgcaaaaagaaatctgttgaggctctgaagccagtcaacttccgtcctcaacgagatgagcggcgatgcattggctgtggagaatgtgttttggcctgtccgaatgctgcatggactcgtagtgaaaagaaatactatagacttactttgctgggtagaactggcaaaaagaacccgcgtctgggtgaagatttcatcaagtgggtggacgaagacagtattatcaaaatcattctcaatacctacgactatgtgaaggagtacatcgaccccaatgctcccggcggaaaagagcatattggctacattgtagaccgtactggttttgaagagttcaaacgatgggccttgcgggatgtcactctgccagagattgcagaagttatgactcccatgtattggaaaggtataacatattgatatataacagcttgagagatttttgaaggacacttaaaagtattttttttataaaatagatcatcagaaaacatacaatgaatcactcatactctctattgaaacatcaagctatcttttaataaaaattgattcttgctgtactcaataattccgtctttttgcatttttgaaagctcgttacacatggtactgcggtccacattcagataatcagctaactgttggcggttgtaggggatcaagaaagaattgctcccggcgcgtttggcgcattccgaaaaataggacatcaaccgcccccgaatggatttggaactggtatgctggattctttgagaaagctgaaggtttctgtgagcgcagacagtcagcagatttcggacaagtcttgtgtggaatggacaggcattggtacaagtagccaggacacgccccacattcataaacaatatggatgtatcctccgcagcggacaccgtaaccaacatcggctcccccggaatgcaggcatacacctcggcgaatacagatccgggcgcaacatgccccaaaatactggtattgccccagatatcgttgcaggagatcaccgccaagccggacagcaagatcccgatattttccgtgatgtttccttctgaaaggattacctctcctttttgaaaactacgcgttgtggcattcaggcaacccaaaagagatgtaatctctgcttcttccagtcctcgaaacagttgtgtattggataaattcatatttttcactccttgttgttataacaacagactttcatttcatattatagtatactaaatccagaaacgcaagagaaaggatgaagcaaacatgattcggaaaattattcagatagacgaaaaaaagtgcaatggatgtggggcctgcgccgaagcctgccatgaaggggctatcggcatggtaaacgggaaggcaaaactcctgcgggacgattattgcgatggtctgggcgattgcctgcccacctgccccaccggtgcgatttcctttgtggaacgggaagctgctgcctatgacgaaaaggctgtgcaggaaaatatgagaaaaaagaacagaatgaattctccttccgttggtgttcatgcgggttgcccgggcagccgaatgcagcgaatccagcattcgcaggaatctgctccttctgccccgatgcaggctgagtcacagctgaggcagtggccctgccaaattaagctggttccagtaggtgccccctattttgaaggagccaagttgctgattgcggcagattgcagcgcatatgcctatgccagaatgcacgaggattttatgcgtgggaaggttacgctgattggctgccccaagctggacaacgtggattacagcgaaaagctgacgcagattatccaaaacaacaatatccagagcgtgaccattgtgcggatggaagttccctgctgcggcggactggagttagctgctaaaaaagcattgcaggcaagcgggaaattcattccctggcaggtggtcactatctcgattgatggaaagattctggaataacctctgattcggttcttcagtttttgaaatatatccgacagacaaaaacaaattatattgcaggaggtgactgttatgagtaaaaaaatgaaaaacattgcgcaagccgaggttctgacgctgaaggagcagatctcctatcaggaggggcaggtagtcagcaagacgctggcgcaaaatccggcagtaagtattaccctgttctcattcgcaaagggcgaggaaatcagcacccatgaatcgggcggcgacgctttcgtaacctgtctggacggcgttggaaaaatcaccattgacggcacagaatatctgttgcatgaaggagaatccatcgtcatgccagctggacaccctcacgcggtatatggacaggaagcgttcaagatgcttttggtcgttgtattttaatcaaacgtaaaattgacagagggaggtgattttatgaaaataaaagtagatcagaatctctgcattggctgcgggctttgctgtcggatctgcgacgaagtttttcgtatgaatgagtacgagaaggcggaagcataccaaccagcaaacgatgacaatcaaagcgccgtgcaggatgcaattgattcgtgtcctgtgtctgcaatcgcttgggaagattaattcaagcgcatctatatacttttttgattgaaaagtaactacatcatttcaaattttaaaagttttaaggaggtctattatggaacaaaaaatgttttgctatcagtgtcaggaaaccgccgggtgcaaaggttgcaccatgtccggtgtatgcgggaagaagcctgatgtggcagctatgcaggatctgctggtctatgtcacaaaagggatttcagctgttacaactgcactgcgtcaggaagggaagcaggtatctgcggaaatcaatcacttgattaccctgaatctgttcaccaccatcaccaatgcaaattttgacaaagagagcattgaggcaagaatccgtgccacactgactgaaaaagatgtgctgttggcgcagattgccgatccttccggtctgcccgaagcggcaaaatggaatggctctggcaattgggaagaaaaagccgcaactgtcggtgttctttctactgaaaacgaggatattcgttctctgcgagaactgattacctacggtctgaagggattgtccgcatactccaaacacgcaaacgttctactgaaggatgatgaggaggtcgatgccttccttcagcgggcgctggcagctacactggatgacaatctcagcgtagaagaattgattgctctgacaatggaaaccggaaaacacggcgtatccggtatggctctgctggacaaggccaacacggaagcctatggaaatcccgaaattacgaaggtaaatattggcgttgggacaaatcccggtattctggtttccggtcacgacctgcgggatttggaaatgctgctggagcagacacagggaaccggcgtggatgtttatacccattccgagatgctccctgcccactattacccggcattcaaaaagtatcccaactttatcggtaactacggcaatgcgtggtggaagcagaaggaggaatttgaatccttcaacggtcctatcctgatgacgaccaactgcatcgtgcctcctaaagacagctacaaagacagactctacactactggcgcagcaggatatccgggatgtacccatatcccaggagaaatcggggagcagaaggatttttccgttatcattgaacacgcaaaaagatgcgctgcacctactgaaattgaaacaggagagctgatcggcggatttgcacacgcgcaggttctggctctggcggatcaggtggtcgatgcggtaaaaagcggcgcgatcaaaaagttcgttgtgatggcgggctgtgacggccgtgccaagagccgggaatactataccgaatttgccaaggcactgccgaaagatgctgtgatcttgacagccggatgcgcgaaatacaagtacaacaaactgcctttgggcgacatcaacggcattcctcgtgttctggacgccgggcagtgcaacgattcgtattctctggctgtcattgctttgaagctcaaggaagttttcggtctggacgatatcaacgacctgcccatcgcctacaacattgcgtggtatgagcagaaggctgtcatcgttctgctggcgcttctgtatcttggcgtgaagaatatccatctcggtcccactctcccggcattcctcagccccaatgtggcaaaagttttggtagagaactttggtattgcgggaattagcacagtagaagaagatctgaaattctttttttaaactcatgcataaataaaaaagacagctttgcttctgtaaaattgaaccgacccccaaaagttagactaaaaaatctaacgattgggaggtcggtgtttttatgccaaaatatagttttgaatttaagaaaaaagtagtggaagcatatttaagaggtgaaggtggatattcctatttggctaaaaagtatgtcgaactgcttgtactgcacacccttcttgtgcagatactcattcatgcgctgtgcgctccatccgtagtccttggcgataacggaaatgttcaccgcatccttacatttaagaaccacatcgtagtaggttgccttcggcttcagctctgcgatctgctgtgcctgtactgcgaccgcttcctcaagtgcctgcctcttttcgcgctcggccttcaatgcctggaaggctgcgatggcaaggtcgggatttgcgataaggagaatgtgaaactttttctgtaaataatgttttagaaggtcttctatggtaaaatattttatcataaggaggccttttattatggcaagagaaaagaaacctgtacacagagtacaaatgacagaaggaaaacgtaacatcattcatcaactcttagaagaatacgatatccaatcagcagaagatatccaggatgctctgaaagatcttcttggtggaaccatcaaagagatgatggaagcggaaatggatgaccacttgggatatgaaaaatcagaacgttctgatagcgatgattatcgcaatggttataagcgaaaaagagtgaatagtcgttatggttctatggagattgaagttccacaagacagaaaatcaacttttgaacctcaagtagtaaagaagcgtcagaaagacatttcagatatcgatcagaagattatttctatgtatgcaaaaggtatgacaacccggcaaatttcagaaacaatcgaagatatttatggttttgaaacatccgaaggttttatatcagatgttacagacaagattcttccacagattgaagattggcagaatcgaccactagatgaagtttatcccatcctgtatattgatgcgattcactattcagtccgtgataatggagtgattcggaagcttgctgcgtatgtcatccttgggattaatgcggaaggtaagaaagaagtgcttaccatcagtattggagaaaatgaaagttccaagtattggctctccgtcttaaacgaattaaaaaatcgtggtgtaaaagatatcctgatcatctgtgcagatggactcacaggtatcaaagaagcgattgcggcagcatttcctaagccagaatatcaaagatgtatcgttcatcaggtaagaaacaccttaagatatgttccagataaagacagaaaagcatttgctacagatttgaaaacgatatatcaggcagcggatgaaaagaaagctttggcagctttggatagggtaacggaaaaatggactccgaaatatccgaattccatgaaacgctggaaggataattgggattccatttccccgattttcaagttttcagcaactgtcagaaaggttatttatacaacaaatgctattgaatctttgaattctacctaccggaagctgaaccgtcaaagaagtgtttttccaagcgatacagcccttttaaaagccctttatctggctacctttgaagctacgaaaaaatggacagcaacgatccggaactgggcacaggtctatggtgaactaagcattatgtatgagggacgcttaccggaataataaaaaaggtcaaaaagacgggcggatttcccgcccgctcttgacatacaattttgtaactgttatatataaaacaaaggcgaaaagctgatttcattccagttttccgcctatcattatcatagaagatcttatttacagacttttcttcatagtctcacaaatcagattaattatctctcatttgttcagccctttgtttacctgtaaatcaattctttcaacacaatctcttctgctgcattccggatgttatttacagctccaacccatgccatctgatcacgagctttcaattcttccgcaatgccctgtctctccatcatctgacgtaccagaataaccattctctcctgtgcttcatcgtccacaagattcagatgttccaccagtctgtcttccaacatatacagtgaatacattgccggacgatactctttcagatatgttttccgaatcattccatatttcccataatgcggttcttcatctgtactgacaagattcggatagtaaattccgtctgcgccaagtgtgtaggttccacccattttttcaaatgtgcttttcatgtgttattcctccttgaaatcagcgatatccttagatcatcgcataatatttcagggcagccttgatagcatcttctttctctttcgggcattgtggaactcttgcattttctgattttggaagattatagttttctcccacttcaattccacatttgcgttttacctgagaaatatataaatttgaaaccttcaagccaaattctttcagcacataatctttgatttcctgataggttgctttcaactcagcactggtggcatccagctcgtccaggtctaagtcgatctctatcgtgtcatctggtttttgttgggacaaaagaacaaccgtctcaacggtactttcgttgtcccaacaaagttcctgtgtttccctgtctccaaaatacaccggaaaccggaactttatgtgcttcaggaatctgccatccggctgctcctaatcgtaaatgtccacacgttctacaaagctgttgagaaattctttcttctccaagtcggtgaacttatcatatagtttatcaaatttttatattcttcatagtcttttcctctatatagtaactccgctttattgtcccaactttattttagtacttattccaattcttttcaatacttattttccatgttgacgcatttctctgtcacttgtataattaaattagatatagagaatatctgttatcaaaatatcgtccacttaccggaagcatctaataaatatccggcttgaaaattatttagaaattatttcagtttttgatattgtgtttttatcacacattgcatatactataaatacacaaaaagccagaaatagaggaggtgttagtatggctacttcaagtattactcataattttgtcgtatccaatccaaatagtgtaaagcgttttgtcgcagcgattgacgaagccgatcgtgaccgcacaccaaagcaggcacttcccggacgtcagttaacaaacccacaggaaatcttagctttaatgtcaaaaaggaagaaaaaacatgtctgataaatattttaccgttaatattcgggcatatttggataaagacgaaccgacatatatcggagaggaaagtctttacgacttgctctccgatttttcttgtccccaaaatcccgatgtggaatactttttattacataatgcggttgagtttgccaaaaaagatcaatctatcacttatctggtattcgatgccgaagatgcttcactggtcggctatttttctcttacagtaaagccaatatctgtccgggcttcaaatatcagtaagacgatggcaaagaagctgtcccgtgtcagtattctggatgaagaaacacagtcttacaacacagcagcttacctgattgcacagttaggtaagaactattctctaccaaaggaaaaacgaatccctggaaacatcctgctgggatttgcactggaaaccatatccggtctcaaatattccgtaggcggcgttatggaatttcttgaatgcgaagataatgaatttcttctgagcttttatacacaaaatcatttcaagccatttgatacccgtattaccgcttcccagaacaatgaacctcacactctatatcagcttttgaaattcatctgaaaacacataaaaagcggcagtctgatttacatttagtatttcaggaaactgccgcttctttttcttctttattctgtttttcttcctccaactcccggaggacttcatcgccgtacttatcaatcatccgtaccagaaaatcaatgcaccgctcaaattcaatattctgttgcataagctcctcctgtcattgttttaatctgagcttattttacagaatttcttcataaacaacattgaaccggaattgaccgtaaattgagaaaatcatgtaacgaaaatctctatttatcttgaaccgaatatatgttcgtggtatgatatacttattcaaacatgttcacttaatttaatctatagaaaagaggaaatgcctattggatcgttgtgattttagttcgataatgacatatttaaaaaaccaaatcagtgaaagcaatcagatgagccagcctgagtttttatacgaaatatttgaagattttttagacagtcctgaaaacaaagaatttactttggataatggtctggtttgccgctggatgacaggtcaggcgaaaatcagtcccaaaatatcttctttttatgcaaaaccaagcaatcaggaaaaactggcaaaaaacatacaacaaaatattcttccactaatggcagactacagcagaacacttcaagatatttataccttatttatccaggattcttcaatttctgaagccaaaaaagcagaacttgctcctctatacaaacctgccgatttacgtctgctgtttttggcaaaactgatttctttcggtatggaacgcccgtttattaaacgtgataccaaaaaccagaaattgatcgcaggcggttccctctcaccaatggtactggattatattatggatagtgaagtcccaagaccatgccgccattttgtagggagagaagatgaaacaacagaattacattcccttctggaagataatagcaaagcatttctttacggaattgccggaatcgggaaaagcgaactggcaaaatcctatgcaaagcaatataaaaagcattacacaaacatcctgtattttgaatatgccggagatttacatcaatctgttacggatatggattttgctgatgatttaccggaagataccgaagaagaacgtttccgaaaacacaaccgtttccttcgttctttgaaagatgatactttaatcatcatagacaacttcaatgcaaccgcaacacaggactcctttttgtccgtaatgttaaaataccgctgccggattctttttacaacaagaagcaaattcgatagttactgtaccctgcacttaaaagagattaaagaatcatccagcctgtttcaactggtatcttccttttattcggaagccgaagagcaccgggcaatcgtagaaaaaatcatagaaactgtacactaccatacttttgctgtagaactggcagcaaaacttctggaaaatggaattttagctccgcagcaattactagaaaagcttcaaaaagaaaaggcttctctcgaaaatgaggacaaaatcaaagccttcaaagacggacaaagcagtaatgcaacctactattaccatattcacaccctattttccctctattctctctcccaggagcaaaagggaatcatgcgtaatctgtgctttcttccttctggtggtatctctgcacggctttgggctgaatggcttcaattaagaaatttaaatgatatcaacgatctgatcgagacaggttttgtacagtcaagtctccggcatactatttctctgcatccaatgattcaggaaattgcagtttccgagaccgcaccttctgttacaaactgccacacgttattggattctttgcaaaaaatatgtttgatgcatggcattgaagttagctattataaaaaattatttcaaacagtagaaaacatcatgcttttcattgaaaaggacgatattccccaatacctgttatttttagaagatgtttttccatatatggagaagtaccactatcaaaagggtatgaaaaaaatcatccaggaactacagcattttataaaagcaaatacttacgggactgcatctgaccatgccttactattggattatcaggcagctttggaaatcaaaacagaaaaagctataaaatcagaaaaagaagcacttgctcaaataaaagaaaccacaaaagaaaatgcccatctggtttccaacctccattccaatcttggagggctttaccgaatcaacggacaacttgatctggctaaaaagcacatggaaatgggtatctctcttttagaacaataccagcttctttatactaatgacagcattccccagattaataattacgctgtcctattaactgaaatgcaagaacctgcccttgccctgtcttctcttcagaaattagcacagattatcaaagaatataattcaaaccactgtctggattatgcccaggtacaggaagccattggcaatatctgcctgatcactgcaaatatttcgcaggcaaaacaacattttcaaaaagccttaagaatttatgagggtatatgggcagatgaacctgaattgattgaagaaaaacacaaaaaaattcaggaattatatccacaagccggaattgctctggcaaaaagtatccttcacaccaagcactaaacaagaccatcatatttttaataaataatagttgcagcagaagatacgatagtttcccgtaccttctgctgattattcaaataactctatccattcattagccttatttattacaaaatctcctttattgttccatctgcttttcttccaaatattcttccagacagatgcctctctcgtggatttccgtagcagcctctactcctacataacgataatgccacacctcttctgctactcctgtgatatctgtcttatttccaggatatctgaaaataaacccatacttatagcagttttcttgaagccaaaaagtaagcgcttaaatcttgggtagctttactgtctacgtttttgaactcataatgatagcaaatagatttttactacactccgcttgataggagatagaaatttactatatttggaggtttcattatgagtaataaacgtgctccaggacgttccctggacgaatggatggaactggtcaccgaatgcagacaaagtggcctgacagatgctgcatggtgtaatgaacatgggatatctcccagctgtttttacaatgcagttacccgtctccgcaaaaaagcctgtcagataccggatccagttggaaaagccagcactcttgaccttacgtcccataaacaggatgtagtccagattgctatagaaccggagtattctccggcaggactgattccagataatggaaacagtcctatgcaccttgacaattcacatacgattgaaatcgaagcagacggattgcttatacgaatgagtaatgagatcaaaccggtacttctgaagatgcttatggatacgctgaaggagtcattatgttagcggacatctcaagtgttgatgcgatctatatcgtctgtggcagaacagatatgcgcaagtccattgatggattatgtgcgatcatccaggaacagttttcgatggagatcgaccatgcactttttcttttctgcggtcgtaaatgcgaccgtatcaaagctattttaaaagaacctgacgggatcgttatgatctacaaaagactgaccgcccagggatcttaccggtggcccaggaataaatctgaggtccggaatcttacatggcgggagttcgactggctgatgtctggcattgatattgagcagccaaaagcgatcaaggcaacgtaaaaaagatgcacataaaactcttgttttttgctgtattttcggcactttcaaggtctggtaaatccgctgttttgctgggaaaagccactgttttctggtataatggaaacatcagaaacaggaggaaaaagcagtggcagacagttccaaagatatccagctccgtgagctgaaggacatgataaacgatctcaaaaagatgataaaaacacttcaggcaactgtcgatgctgccaataaacgggaagaggctcttacccaggaacgggataacctgaaagaagagatagaccttctccgtaaaaaactgtttggcacctccagtgaaaaaagaaccatcgatattccaggccagttaaactttttcaatgaagcggaactggaacaggatccagaagctgtaaaagcagaggatcttgaggcacttcttccggaaaaaacagcaaaaaaacgaaaagcaagagctacagatgctgaacggtttaagggagttcctgttgagaaaaagtatctggaactttctgaggaagagaaactctgccctgcctgtggtaccccactgaaagaaatcggggaagagtttgtccgccgggagctggtttttgtaccggcaaaactgaaagtatatgaatactacagtaagagctatgagtgcccgcagtgcaggcttcaggatataccggttatcaaaaaaggaaaagatggcagatcccatatgctttatggaatggcttctgccggaacggttgcctgggtaatgtaccagaagttttgtaatggtcttccatactaccgtcaggaaaaggactggaaacagtatggcgtggagatcaccagagctactatggcaaactgggtgatccggaattctgaagcattttttcttcctatgtacgaatacttccacaggaaacttctggaacgtggattcgcgatggcagatgaaacgccacttcaggttctgcatgaaccggaacgccgcgcgcaaaccaagtcatatatgtggctgttccgcagcggtgaagacggaggaccacctattatcctctataaatactcggagacccgggccggggacaatgccgtagattttcttcacggcttcaagggttatctgatgtgtgatggctatagcggatacaataaagtaccggatgccaaacgcacagcctgctgggcacacatcagaagatatctgacagatgccatccctaagggaaaagcactggattatacccagccatctgtacagggaatgctgtacattaaccagctcttccatctggaagatgtgatcagatcaaagtattcttccttcgatgctataaaaaaggctcgccttgaaaaagaaaagccggtagtagaaggctttttgtcgtggcttgatcagcagaaccctacccgtggaagcagaatggataaagctgtcacctacattcagaaccgccgctcctatctgactacctatctcgaagacgggcgctgcagtttttctaataatctcagtgaaaatgcgatccgtccgtttacagtaggccgtaaaaactggctgttctgtgacacaccaaacggagcccaggccagcgctatcgtgtacacaatggtagagatggcaaaagccaatggcgtaaacgtctatcactatcttacttatctgctggaaaaactacctgatgatagaatgagtgatgatgaattagaacttctggctccatggaaggaaaccgtcaaagctgaaatcgaacgtcgtgcaaacggatcaaatcaatcatatgtgaattgtcaaggtgctccgactactgaaaagtagtcggggatttttctatcatacctaaaaattaagcgcttaccttcttccatcataataaataatgcatccactttacattcccttcccgttgcatcttagacatggcgaaacaaatctccatacctctatcatctgccattctatcctgtcagcattctcccgggtaaacactttattcctcatcatgctgttcagaacctttctcacacgtttcactgccagttcattccccatatccggcgagtaagcagatggcgcattgggaatccctgccaacatagcgcactcataatcacttaattctaatggttcccttccaaaatagcctacagctgcctcacgaataccataataaccactaccaaaataaactgtatttgcatataactcaaagatctcttccttagtatatttcgattccatgtccaatgccgcaaaaacctctgccgcttttcgctcaacagttactatttcttttccccgccgaatcactacaccgtaaaggcaatccgaagttatcacttattcttatttttaaaaaatctaatgatgtgggtgtcaaaagtacaccaacatctgattttagttccttggcaactgaataaagctatgttttattgtcgatttctggtaaaatataagcataaaatatattttacgaggtacagacaatgtcttttgttttaaataattaccagcagatttctctctttgattcactcggatttttatctgaacgcaaacaaaaaatactggataaatcatgggcaaaaccgttttcagaacatattttttctaatatcgatgagatgatgtttgcgcctctttacagtgataagaaaaattcccgtccaaatgctccggttaatgttatcgtaggggcactcattcttaaagaactgaatggtcttaccgatgatgaactccttgaggaatgtgagtttgattttagataccagtatgcgctgcatactaccagttatgaaaaccagcctttgagtgaccgtacgttcagcagatttcgcgagagaaacgccgcatacgaactggttactggaagggatcttattcacgactgtatcgtttctcttgcggaaaacattcgaaaatatatggatattgctccgataatcaagcggatggacagtatgatgattgagtccaacatccgtcagatggggcgtttggaacttttatatacttgtctcgcaaacctcgttcgtgaaatagcacgcaatggacaaacggagcttcttgaaggactgaacgattatgaagacccgaataacagaaaccgcatagtttaccatgatcagtccacaccacagaatgaaaaaatccaaaaggtcattaacgatgccatttccctgctgcctaaatgtaaggatgagtatggtcagacggatgattatcagcttttgcagagggccatcgatgaacagaccaaaaatgatgataaaggcaaccggattccaaaggccaaggaagacgggatgactcctgatattttgcaaaatccatcagatccggatgcaacctacagaagcaaggcaggcaaaccccacaaaggctattctgcaaaccttgttgaagctgtagatgaaaaaggatctgtaatcgttgattaccagtatgacgttaacacaagaagcgatgcttcatttatcaaagaatatctggaaaacgctgaagtttcagaagaaacatctgccctcattacggacggtgcatatgccagcgaagaaacttccaggctggctgccgataaaaacatggaccttttaactacaggacttcttgggcgcaaacccaaagagatactgggacagtttgagcttgatgaaactggacataaaataaccagctgtccggcaggcaacgttcctaaaagcggttcttatataaaacaaacagattccatacgagtatctttctataaacatcagtgcgaaggctgcccttaccaaagcaaatgtaatcctaatgtaaaagaaaggacagccagcctgattattccactaaaatcaagaagacggattctggagtctacagaactaatgaatgatgaaatccgaacattcataggacgaattcgcaatggagtggaaacagttccatctatactcagaaataaatacacggtggacaaaatgccggtaagaggaaagctgaagacaaagcagttctttggctttaaagttgctgccctaaatttcagtaaattaatacgttttactaaaggcaagttaagatgcagaagctttgagctggcgtaaagggataaatccccttcttatcatgatgcatcattgaaaaacatagttttattcagttgtcaaagaacaaaagtaactgtatgcgtgccaaaagccattgaacaatcgacttttgacacctacatcatctaataaaattaaagcaatccccacaataatgactgtagttcttaccgatgaatctggtgaaaataagcaaaatacaacaagtcccgctccagcacctggaaaaatctaccatctatttttcatgttttattatgacctctacacttcctttaccatctgcatttctttgaattgcatatccaagaatgtatactcaatctctttgatttcctgaaagccgacggaagcatacattttgcgtgcaactgtgttttccaaagacacactgatatacagtttgtccgcattatgcttgttctcaaaatactccagaaattccagcacagctcgctttccataaccttttccctgaaactgctttccaatcataaagcggctcatagaccagccgggtaacatatcatcatagtcgtagggcacaaagccaaccatcgtttcatcgtggtagattcccagggtgtaaaggtcatcctcgtaagccgcttctaccagagacagcttgttatctgcaacaaatttcacctgattatcatcaacggtcaatgccatacaatcccagtaattggttttgtctatttcccgaaatgtcattttaaatcctctcattctaaatagtcctgtttttccgtctctgtaacagttcactaaaccggaagttgtcactccggtaattccatttcattattcatttttacaaatccatatttttcatataacggtcgccctatatccgtcgcttctaatgaaatagacgagatacctttgctcttagaatctttaaccagcatatctaatgttttataggcaatcccctttcttctgtacttagggttagtatacatattcattatatacgccttatttccacttggattgtgataggtcggcattacttggaaaaaactaacaccaccagctccaatacaacagctatcattaaaaatcaaatacgcaatatgagagccatcacaaagtgctttttgatagtagctataagattgccttttcacttcactcatatcagtatcagagcaaagtttattagctgcccttaatacctctattcttgtttctaccaatatatttatatcttcaaccgttgctcttttatatgttaggttcatattgtattctcccctgcaaatccttattttccatgttccattctcacattctaaaactgatgtataaaatattctgcaatatagcggcttttcatttccactgtgccgcagttttatctattgtttcatttacaggttctttatcgtatctgtgattgccatgtctcgcatccatttcgccggcgtgtatactgcagcaatacagaaaaaggtaaccattaaaaatagaataaacgaaatcttacacttttcccagtccctcctagtcgaccccttttcttaaaatatctctgccgaacgagagacttactctgtccggcaggatattttcaaccttttacttacaattcattaattgttgcggtaatcgccatattgcatatccgtttagatggagcatgggctgcaataacagcagaaacaaaaataaaaactgttactacagcgagcaatacaatcggcaaatgccatgccactccaaaatgacgtgtaatcatcagcgtatgcagaaaacggctgaaaggaattcccattccacaacccaatatcagacctgaaacagcataggtaaaggcttccgcagaaatcattcgtgtaagctgtttattgtccatgccaaccgcacgcattgcaccatactgttttgttctcgcagatacactcatagaaatactgttaataatattaaatagagtaatgaccgcaataattgctaaaaatccatagcaaacaatccgtgatgcccaataagttgtgttgttcgtccgattactttcccgttggtcagtaacagcgatatcgtcattttcaagttttctgatttgtgctactgtttcatctgtagcatcttttcccagttgaacaccaatcaaaccatatttttcctgtcccatgaggcggtcaaacgtttcctgtgaacagatgataatcagatcatcgccaaacagtccttgtgacagggcgcaggaaatctcaacctcagtgcctgcaatctgaatggtatcgccgacttttaaggagttgtttttattaaagactgtcgcaaccttgttgctctctccataaacttcattcaaggttccctgagcaatatttccttttgcatagtccaacagcgtatcatcataggaaacaatattgatatggtctatcccagctcttgaagatgttgcagggatattacccatatagctactgccataagcatttgtaacgccatctatttttctgatttcatcaaccaaatcatggtcaagaaccatttcattactataactggctaacgcaagatccgctgaggtaacatttagtgatggcagcaacaaccgtaccatatccatcacaatggaaaaagaaagaaacaatataatacagagagcaaaggaggctgtcaataaacaccagtttttctttgatgctactgcatgatgtatgcccaaagaacagtcaattttcccaacacctatctttgcggcatggtaaacagtagctgtgttttccatattaccggaaactgctgacataggagaaaccttagcagcacgttttgccggggattgtgccgccaaaagtactgttacaattcctaccacggctccgctgataaggccggcaggactgattttgaacaccggtgtcacagcaagttcaccaccgacaacataacggagtaccccgcagatgccccaactgatgattgtacccataaggattccagcgggtactgctatcttgcaccaattcaatgcctccagccgcacaaagcggatgacttgctggcggcttgcgccaatacagcgcatcatgccaaagaactgtgtccgattggctatattgctgttcatgctaccagagatcatcagtacgcctgctaagagcactataataaacagaatcactgcaattccgtagaaattcttcatagcggtattgctgctttgccctgccatacccattacaccggtattttctgagatgttttccgccggcagctgatattgtgcctgcaattctgtgatggctttggttgctttcgtcgcatcctcgaactgcacataataggctggctcattgtctgtaattccattattctccataatggaggcaaatgctgtttgtgtcatatatacccctactaaataggtctgattttcataatatcctttatcctctgtaccaaacccagatattttaaacgttgcatctccggcaggggtatgcaaggttacattttctccaatctgtgctccaaatgctgttacagcatttgggctaagcataacttcactatcattctgcggaaaagccccatccgtaattccatttgagatctggttcatataggtttcttcggtaccatataagacagcttttttttcgcgaatacgatacggctgccctccttcatagttaaacacggaagatgcacctacgtcggtaacatctgtacgtctacagatttcctctgcaatatcctgtgagatatgatccagttgaagatgccagtttccatgcttgctcaacatgatgctgctttccgtccgaatcatcatgtctgttacactgaaaatcgcagtcacaagaaaaacagcacatataatgcatagaattgtcatacggttctgccgcctgcggacctttgcagaaatcggcacaagactaagatagcttttcattcactgcacctccccagatcggtcagcacaccatccgacacctgcagtacccggtctgcagtctgtgcaatgctccgactatgcgtaatcataataatagtctgtgcgtatctctttgacgcatttttcagcaaagtaattacctcattgctgttctgcgtgtccagatttccagtcggctcgtcagcgagtatcagcgaaggccgtgaaatcaacgcacgcccgattgccaccctctgctgctgacctccagataactggctcggcagatggttccggcgttctttcaagttaagaacttccaaaagctcctccagatacttcttatccggtttctgataatcaagcagtaccgggaagataatattctgctcaacagtaagctctgggatcaggttgaatgcctgaaagataaagccgatgttcctcctgcggaaaaccgtcaacttgctctccttcattgcaaaaatatctttgccgtcgatcagcacttttcctgatgtcgggttatccaacgcaccaatcatattgagtaatgtactttttccggagcctgattccccgacaatagccacatactcaccctttgggacagaaaaattgactttcttcaatgcccgtacggatgtttcaccactgccgtaagttttggaaattgatcttacttctaataaatccatattataagcacctctttctcatatttttaattcgatgaaagtataccatccaaaccttactgtaatattactgtaagcctacaattttgtagggattaaaaaactcagggtaaaagttgttccggctcctaacgtactgtccacttctatcgtgccattgtgcgattcaacaatcatttttgcgagaggaagaccaaggccaatgccttgcttgtctttagaaaaacggctccggtaaaacctcttgaatatatggtgcaaatcctccggctggatgccgctcccattgtcctttatgataatctgaactacagatgcagactttttccattcaatccagacaaaattccccttttctgtgtggtcaaaggcatttttcacaatattttctactgcctctatcatccagtcatggtcacaaagcagtgaaatatgttcatccccggtcagcaccagttccttctcttcctgcttagcacggtatgcaaagtgcagttccacttctcccatcatatccgccacattttccgaggtcttttcaaatacaatggaaccggcatccagcttcgtaatcttcagcagattctgtaccagcgtttcgatccggtcaagttctttttctgacagtgccgcaaactcctgaatttgcggcagttcttccgtctccccctgcagaagtccgttataaatattcaatgccgcaagaggagttttcagctgatgggaaatatccgatatggtatttttcaaaagctgtttcgattttctctcattttctacatttgcgtccagaatggcagccagagaatttacctcatggaacagccggtacatttccccttcttcatcacattctatcctcgtctccctgttaccggaaatgtattctgtgatctgagccactgcattttccataatttcattctgttctttaaagtatccataacaggctgccataatcgcaatacacatgaacaaagcgcataacagatgcatattccgcaagaactgcgcatccgttccagaggaacggagcgccattccgcttcaaactgagcaaagctcagcaggttgattaattactattggttattctgcaatccctgccaggaaattcaaggcgatatgccttagatgtcattcgacttaagcaggcatctgcgtaggtggaatccccaaaaagctgataccatccggatactggaatctgtgagataataatagttgccttgcggcagtctctggactcgatgatttcaaataaatcgcggcatttctcgatgtccagatccattaagccgaaatcatctatcaccatgagatcataagcggccatttcattcgaatactcaaagtaagtaccttcctgcctggcatgatctgattcctttaagagtgtgttcgcacgtatgtatttaacagtacggttctgatgcattgctgtgatacataaggcgcaggcgatgtgcgttttcccagcaccggcccctccggtcatcagcaggttattcggctcatcgatccaatcacacttggccagaagttctatgacgtgtgtattcagctgacgttctggatcatagattgaactgtcaagatcagctgcaggatatttcagggtcgctttcttcatgagacgtttaaactttttactctcacgctgatcccactcctgatttacaatagcagcaaagcggacttcaaatggttcgagacctgtgtttggttccagcagctgcttttcaaatgcttcagccataccggacatgcgaagtttatacagccgatccatgagtatgttctgttcctttgtgagtttatcgttataaagatagtcttttaatctgtatgccatagtacgtcacccttacttatagtagtcctttcctctgatattttcatgattgggcagtgttcctggtgaatgctcggggagttccttcacatccatctttttcagcatctgcttgaaggtaaaatacttacaggaattgatctctatacatttacgggcaacttcttcagcagcacctttcgggattgtttttactttatgcaggatacctgcacaggcattataagactgctcttcatgttttgatgatttaaggagtctgtcaatcagttctgacatcgcaggaccaatggcagaagcccagcggcggtaataattaccatcctttgaattgacttctttgtaataaaggtgttctggcggcatatgttcatctaccgtgatatacagcggaaactctctataagaccgcttatgtgtacagatcagccgattatactgatcacagattctgatctctgaagcggttgccttcaggattgcaggcttgccacagtaagagtacaatacggagtagtagtggccgtcatactcgatgtggtagttgttgggaatttttaggaccgctttatagtcgcaagccgtgtaacatccgcctggcagtggtttcatacatggtttgtcatacttttcgaaagcatcctgtcttgagaaatccttgccttgaaaagatcgtttattgaggactgctactatttttttgatttcagcattcaggtcttcaaatgatatatatatcttttctttcagtttctcaaccaggtgtatttcaagataacgtacatgattttcaactgtaggcttgcctttcggctttctagcgggtggtggaagaactatagtttcatagaaatcttccagatctgcaaatgtagactgcaggataagttcatcctttgtgtgcttggttacagcagttcgcaggttatcgggcacaaagtatttcgtaacagcaccataaaatgaaacagcatgggcacagccttctataaaacatgggagcttctcatttggaaaagcttctgcatagatcaggctgctgactccaagcgtggtcgcaaagatatggacttttttgatctcgcccgtttcggtatctgttaacagttccggctgatcaccgacccagtcgatatacatcttttcacccgggattcggtttacggccattgataccttctggccaccatagttttctgctatgaatcggttgaagtattcgtaaaactgtgacttctcataaccatcaggattcttttctttataatccagccaacagaacgaaatgttcatgcggctccctggtgcatggattctgtcatagtaatactggaaatctggaagtgggacatctttcctctgtagatttttctgcggatagaaaaggttctccactttcttaggtgccatcattcggagttcctcgattgggattccgttggcatggtatcggctcatgatcagatttaatgtacctgagccaatcttgtaacggtccataacggacctggtctggcatccattcaaacgcatctggatggagccgataatcgtgttgtagtcttgcatagttatgcctcctttcgcaatcatttgatgactacgaaagaactataacacgttgaaaacttattgatcagctgaagcggaaacgcgttcagttacatccggaaagactgatcagttcttagcggaatgcgtggtcagatgagccggaatttgcaataacagaatataaagtgctgcattgttaagttcaaacatcatgaatgacacggaaaccacgataaatatcagcatacaaaccataattttataaaataaagccttaatttttctgtttgccagtattttcatgatgcacctcattcagccgtgttccacttataacccatgcgacggacggtcacgatccttttgggcttacccggatcatcttcaatctttgtccgcagtctgcgtatatataccgtaagggaattattgtctatatagttttcatcacagtcccataaccgatttagaatctgctccggggaaagaacctcatctggattttccatgaataaacataacaatttatactctctcgccgttaattcgacctgcacattatttttatatacttctcctttcagaagctgaacccttataccgttagaattcaattccgtatccgcctgattaaaattatcgctccttctaagcagggcattgattcgcgacataaacaccgccagcttgaacggttttgtgatatagtcatcgccgccgatatccagccccatgataatatctgtttcttcatccatagcggtcagaaacataatcggcactttcgaggcctgccgtattcttttacatatgtcaaatccagaaccatccggcagggatacatccaaaatcactaaatcatatgctccgttttcccataaccggtccgcttcatctttggtatgtgcaacatctagcatatatccctgctttttcacggcaaaggataagccatttattaaactcaaatcatcctcaactaataaaatccatttcatttattttcaccatccttttatcagctgcttaatctccttagaaataactcctgagcttctttatacacttccatttcacttacagccacaacttattttacctctataagcatattatctcaactctatcatcgacaatacaagaaaactgccaccgacagtttttctgtatagtgcggcatacaaaagagccgatagacacacctgttcccagatacctgctaccaactcttatttttcctataaacctgtagccgccacccttatctattacctttctctgaatactcaataaaacattatgtatgcggcaatgccagcggctttggtcattcaaccttaagtgacagacttccagtgaaatcatcacctttgagaacgataaaattatctccggcattaaaagtaaactcgtaaacgtcctcggcagtcacttccgcaatcatatgttcttccttatctcccaaaatgatatgctcatctgtacttccgagccaataaagggcagccgtaccggatttaatattaagtgaataagtcactttcagtgtgctgccattttcacgttccatcgaagtaccgccaaagatatattcttccccgttaaaccggatgtactcagcttcataacttccaacataatcatcaatatccggatcacttaattttgttcctttataattttatctatgaatatacattcttgtttttcttcttctccatcaccttgaaccatgcataaaaaattccaaccataacgttcatagaatgatgtatgatctgtaatcaaataaacaggtgttattcccttattcatatcttctataacaagccttagcaactgccctgctatccccttattccgatattctttttccgtatataccgcacaaacattaggggcaagatctttcatgtcatggaaatcattctcaaccactcccaaactagcaattattttatccttatctaaacaaagataccatccatactccgttaaacccagataagcttccatacactcaaaatatgctttttgaggatatccaaaaccctaaagcaaattgggaattataagtaccccctgcgctttgcttcttctatcagtttcggttgaatcaacggatatgtccagctttccacaagttgttccgtaatgagaattttttcaatttcactatgtaattcattttcaaaagacagaatatttgcaaagtaaagcattccataactctctttaccatcaaaattatctggcgcagtgactgaatatacacaaataggttttatgctgtattcaagcgcgcccgtttcttcatacaactctcgttttgcagtatcaaaaatatgctctccattttctctgtgaccgcccggaacttcgtatgtttctcgctctctatgtttacaaaacacccatttattgtctgtttttgcaatgatgacagcaaattttaataatctgtcatcagcttcatcataaaactttacttcaaccatttatcattctccttcctacaataacagatacaccttccgatttatcgccatttagcgaaacaaggaaaatcatttattagagtaccaaactgctttatcgataggtaaaaagctctcgtgcgtttacgtaagaccaagcctcgcagagcgaaatataccccttgcccatggcgcaccgtccgaaagagaacgcatctgaaataagttcaggcagttgctggagcaaggcggacggcggaaactatgtaaaaaattctttgacagagacagtcgataacggaaataccgtcagcgtgtgaccgctttttcttacaaaggatcacaaattatatcattcttatactctaatgttttatgggatgccctttcatatgcaattatttctttcatcaatgtttctcctaaaaatctaattacatatattcagtaaagaacttctcttatttttctcatctctctccaaacattatctccatagttgctcaccaaaactgaaataattccattattcggattgtattcagatataaaacttactcccggatcacaaccttgaaaatatgccaaatctttgccattgggattatcaattatccacatgccatagccataatacccttcttccgcatcagtcccatctccactctgcttactgagcatatctgaaacaaacgattttgaaattagatttccttccagtaaattagtccaaaagctaattatatctcttaccgttataaacgccccgcccgcaccagtaccttttacatcaacagaaaatatatttgtgcgatagtcatttgtatcatgacaataaatatagttattggcacattttgccggcagcttgtccagttcataataacccgttgatttcataccacatatatcaaaaatactctcttttaggtatcggtcaaaatacatccctgtaactttttctataatcattgcaagcaatacataccctgaattattgtattgaaatttttttcctttcgggtacatcataggcttatttataaatagcggaagcaaatcgctgttatgtctgattttataattgggataatcgatccataattcctcatattcgtccataacactttcatcaaaataatctggaacacccgacgtatgatttaaaagctgtttgactgtaacgtccttatcgatctcatttaatgggatatccaacaacacgcccaatgtatcatcaaactttatttttcctcgttcaatcaactgcaatattcctaccgcaacaaatacttttcctgctgatgcacttgcaaatttcgtttctgccgtgttaggaatttcatttgacaaatctgcaaacccagtttctctttcatataatactttaccgttctgcacaatatatatatttcccctaaaatttacatcaatcatttcttttatatccatttcaattccctccaattttccagtcactctgttccattgaccttatccgtcaagcgactatgtccgtctactttggtggtgagcatactcctttatcaactgagagaacatatcttttgcttgttcttcgatgttaataagatatacgttcagcctaccgcctgtaagcagattggtatatgtgaccttgtgaaactctttcagataacgcaaatccactaagaaatcctccagtataatgtattcgcacatatgccacagtttcccgattgccacttgctgttataatttgttaccagattcttcttcccttgtttttgcccttatgagatagcgagggaagcataaacgcaagtaaaatcgtataaagggataaggcagacacgctgcgataaagcctttgttttcaagcgttttagagaattttattaaagccccatgaggggcagcaactacttatgaaatcgcggttttcaaattcaagtttgtttattcgtcccatgtattatctgtttagaagttttgtcaaatcctcaatagaagcgtccattttcacagaaacttcttccatagtcatgcctgaagcaagaaaacgctttatcaccattttcatatcctcgccaacctctatgatatgtccgtctagatcgtagaatcggatcacccgctgcccccagctatgttcgattacttcttccagatattcaacgtccgggtactctttcagcttattcagaaaaccgtcaaagtcctgttcttcaaagacgatttccgcattgttggatttctttaataccttttcttttggcagattcacaagccagtcaaaatcctgctgcaacgccaggccgcaggtaaacgctatgttctttccataatcctgatacacctctaaaccgaataaatcttcgtaaaactctcttgcagcattgatgtctgctacagaaacaacagtacaaatatatttcatatttgttatcctttctacgatcaaccgtatgtcccagcaaccataaccatattgccgcacactgccccatatagtcaacagttatattattccctttattctcccagctttttaaacaactccgccagcatatgggtagcccactgatacatgtccatcgtctcgtacttccggtactcacactccaatgctaccagaataaacagataaatatcgtaccacaggctccttctctcctgtgacttcgtaaacgctttcatgccataacctttccgaaaaaagggattgtctgaatgaatcctgaagcttacttccaataggggatctccccagatgcagcgttcccagtcaatcaggccggtaatcaccccatccgagacaaaaatattcccgtcccagagatcccaatgcaccagacgtggctctgtcacttctgcaaaaatgtccttatcccactccagatatcggagcagctcatcctgaggtattttcaaatcaacatttccttgtctggcatcgctgattcctgccttcagcatcctgcgaaagaccatgtaccagtctttcccctgaaattccggctgcccaggataaccgaaacaaggacaggcaatacggttgatctccttattaattcttccagtctctttgtatatgtcgttgatctgttcctgagtgaaagcgtcctttatttcatgcagactgcttcctttcagcttttccatgaagaaatacggagattcacatatcgtatggctgtcatcatacacaagcactttaggaacggggattcctccatgctccagcgccatttccatcgcctggacctccgcacacatgatatttctctcatatgtcatgacccggacgccttccgccggggcgaccttcaaaatgactgcctccccactgcttaaagtcacctcataggccacattaaaatatccttccgtcagctccttataagactgtaactcaagtggatggaagaagcgtcccaccatcctcctgagtgtttcctcattctgcctgttctttgttaagctttccatagcctctctccttctgaaattttttgtaactgaatccggccatgaccgccgctgtccagtcgctgattgcaaatacccaccacatggcagaaatgtttttcatgattcctccgagtaacagaaacggaagacgaatcaagaaaatacataccattgataaatgcagcacccttttcccctgtcccagcgcctggaagaatgcctggatgacaggcattacccctccggcacaggctgcccagcagataatctgcacccggtgttatcttcaatttctttcacagattgctcatatggttgcttaccgctttagtaataggtataatcctcgttccagaccattttgttcaattctataggatagactctgaactacatatctaaccattgaataaaagctgttttatctgtacagttatatcccgcatttttataaaactctaacgtcttttgttcttttgaacctgtcagcagcatcatcttatagcaattattatttacagctatggtttttgcataatttaagcattccgtggcataaccatgccctctatagtctgcatgagtaacaacattttccacaaatgcatacggacgtatgtttcttgttaagtttggaataatcacacaaacgcacgaagaaacaatctttccgtcaacaatatttacaataagatgatgatttttatctgctataatttgactccaaatgaccgataaatgttctgactgttccggaacattctcttcatgcaaatacaaatataaattcaacacttcctgcaattcttcttgtttcgcttcacgaatcattcttatcacctcaactcatttatctccgtcataaaatacttaatccataaatttcattataacgaaattattacattctgatttccgacttaaaatactgttcctgaaactttatctgctccatgatttccttctcactaaaagaaagattttcaggtgcaaccacccatttttcttcaacatcatccaatcggtgtacaaccgcaataatctttcctgtaaattctttaacagcttcatttacaccaatgatataagcatcctgctcctcaccatccggagccataatgccttcgatatatccgtagttaacaggataatacaggtctttatgttctggatgataacttccaagcggtctgtcaacgatgacttttacaatctctccaatcattccagcctccttttctgcaaaaacgttcaaaccgtctgatgcgtctgtccacatcgcgctgcagtgcctttgtcagacgcaagtccggctcataccagatattttttagttccagctttccctgctttttatcataagccatttctatcctgcctgcaaatctgtctccatagagaatcggcaaaacataataaccatatttacgctgctgcttcggcgtatagatttcccatttataagaaaaatcaaaaactgctcctataagcttcctgtcccagatcagattatccagcggtgcaataaattcacagcgctttttcatcgggggatttttcaatataaattctgcaagtcctgcatcctccctgcggcaatacaacggctccccaatctcttccacttttacttcaataatcttctcttcttttaacagcatctcgaatatagcatttctttgtgcagccttaagtccctgtatacccagccatgcgtcagaagcacggttccacaaaagccccaccgaaccaatgcgctctgacaccagccattttctataatcaaaatccgaaggaaaaggctctggttgattcaaaaactcttccggaatgcaattttcaatcagatcataatatttcagtgttccgctcttatgatggattcccagttctccgacaaaatacatatgttccaacgccgctctcgacaacctggtatcactccaataccaggagaccttttccactatgtccaaatctgcgctgcacagtggtcctcgccgtgcaatttcctcacgcacccgttcctgtacctccacaatttctgtatggctcctctcccagcttcggtgagcctgccgctcccggccaaaatatttccagttctctattggaagaattacgagatttttatcaaaataatccaccagtttccgatcaatatataaaagctcataaagcatcgtcttttgatagtctttgattctggactgtaaaaccagatccgcatttctgccacagacatccaccggatcaaactgaatgcatcctgcctgccggataaaagaaaggatgccttcttttccaacaaatttgtaatcccccagcaagccatgctttaataacaaaaactgccgcgcctgttttttcgtaaaataaattctgtccatttgccctcccaccgctaatacagaaaacggcaaaacccgtcatcatactgtagcaacagaattaatccataatgtttcctatttcttaaaaatatataaagcattgtacttttcatcatcagaaagcatttcaacacgcccttgtccaataacactctcatattccattgtgcaacttccgcgttcaacctctgtcactaatttatgttcacaatccatttcaaaactggctctattgtccttttcaatcaaatcatattttgtaccttccatagctccatgaaaatacaactcgattttaccttaatttgttaatcggtcacaaaccttttcgctacattcttggtaaatcccatcctttattattcctatgctgcctccgtccactagacttctctttctaattttctaaaaatataatctgtcagcgaccagacagcagtaatagcaacaaataaaatacacagcaatactccacctacaatcaggatgatcttctgaaaaatttgtcttaataccgacatatgtgttttatttttcataattcactataatatctacgagatttttatctgtcttttctacccagaacacctttgccatttgagcctcaaagcgatcctcacgggtcaaatagctgctcattatgatggttggcaatattttgcaaaagatgtccttatataatcaagcagttcaaagcctgtcccgtcagtcatccgaatgtcagaacataccagagaaaaatcatctgccaaaagagcattcctggcttcctgaacgccagaagctgttgtaacaatatgccctcgttctcttaatgcctgtgcaagaagattaagaaaaagagtatcatcatccacaattaaaatttttcttatactctccaaaatttaccctccaatacttttttataaattgaaccatgcacaatactggtaaactcaccatcctatatgttattcctatattgaaaatgtactgtgatggggcagatttccgcaatcgtacctacacgcatattcggtccaaaaagcccaacacccgaagtcacaatcgtatgcatatgatcctttttcagatatccataggaattctcccacataagtgctgtaatcagatttgctggaaacatctgtccatcgtgtgtatgaccacacagatcaatgtccaccccggcatctgccaattcctggagttccttcggttcatggtcaatcacaataaccggcttttccgtatcaagttcccccatcagttctgcagcagtttttctcatattaatcccacgtccgggtcgctgtgcatctggcctgccatacagataaaaactgtcgtcaatcaatactgcttcatcctgtaacaaatgaataccggccctctccaaaaactcatccatctgtatactgctctctttctttttgtttcccccaaaagtaaaacctgccagtattttttcctcaacatcatgatttccataacaggcataaacaccgtacttcgactgaattttttgcaatacggcaatcagttcttccggatcatcaagagcctcgtattcattatcaaaaatatcgcctgcaaataccacaatatccgcattctgttcattgatcttatctaccatctgcatcatgtgtgcagtaccaatgttgtagcccaaatgtaaatcagcggctaataccacatttaagttttctaatctcccgccgtctttattgacagtaatctcatatggtgtaacctggatgatacgggcattgtatgctccccatgcactaagcccaagaacaaccactgcacagattcctcccgccgcagcggtccggcattttaacctccgtttcgtgataaggaaaagcaggaaacaaatcgcatctgccattagaacagccaaaatcagatacagtagtataccgagccaataattactgatcaatttcataatcctcctggccggccctatcggcagaaaaaacgcaatcaataatgacgctgccagaaaaacataggccaggctgattacaacacatatccctgtttttctgaacaatggattgcatgtacccagccatctgtgaagccgaatcagcagatagctgtttgcgataatataaattggtgacaaataaacagcaagcataatctctccatacttttttcacaacacttaaacttttaggatatatgtatcattaacggtatctggcgattccaataccgagattcggatttttgcctgaatatatcagatccgcacaaaatattaagattagtaccaggcatgctggcgcaagtatttttttcggtatgcgcctgaatagatgatcaagaagcggtgcataaaagtatacgatcaccatcccgccaaagccaaaggccagcaacccttctacacaaattcttccattaagattcagaaaataatcgctgtaatcccaccatctcattccatcatacatctgctccagaaaccatgatatgtaatactcaatacagccacataggagaatgatagccagaaattccagcagcggctttttgcgcagcttatgaagtagtgtcaggatcagtatactcccggaaccataaataggcagccacggtccatgaagaaatccgcggttcacaaaactcccatccgaaatcaaatgaaggcagacctcccataaccatcctgtcaggctcatggtgaaaaatatcataaccataggccaaaacgaatcatatttgccttcacagacatgtcctattttttctatcattgatttccacttgtttctttctgtcataatattcccctgaagtattttcccggtttttaaaccggcctcttaaatagaaacaaacttttcaaacggaatatcagacaaatgatctgacacgatcctatgggcacttagatgaaccgtatcaactaattcctgcagctttttcctggcaatagaatctttaaacacattcaaactctgcttcgcttcttcggcatattgatctatcatccccaaagtatatccgaagccatcggaaacacggattaattccgctattcgcttgtctgtcaattcactatacagaccatttttgatatccattgcaatttgtttcagtttggcaccattcctgcaatcagaaaatgagtaaatagccgggagtgtataatatccgcaccaaaaatcattatgtatggtcttctttgctaagtcatctgtggacacaaaatccaacagatcatctctcagttgaaacagcagaccaaatttttctgcaaaccgttctgctgccaatacttcactgtccttacacttaccttcgtaagcacccgatccacaagctatactaaacattgccgatgtctttcctaggatattctcaatatacttctcctctgtaatttccgtattataacgattatcaaattggctgacctccccatcacacatggtttccaatttgtcaaacatcaaaccataccagggcttgttcttcagaccagtccgtctaattgtagaaaaaatcataaagtcgccagcatagactgccatctcctttccgaattttttctgcacggataattgtcccctgcgggtatccgcttcatctataatgtcatcatggatcagtgaagcggtatggcatatttcaatcaccgccgcgacctctgtcgcatcaacagctttccctttgagcctcgcacataaaagtgtcaaaatcggccgtatctgctttccccttgcgttcagcacccaatccagcattttctgcattgacttattgtttgaccggcataaacgctctatatgcgtatttaccatctgcagttcagtttcaagtcctggcacatcctcaatatttatcataaaattactcctcgtctggcaatgctccatagaacaaccatcttttcttgtactttacattttatgaaagtataccatccataccttactgtaatattactgtaaggctacaattttgtaggaatagaaaaatccagggtgaatgtggtgctattttcgtaagagattcgtcactttaaaaataaatacagttggctgctgcttgattttttctatattagctctaatacaaggtccatccaagttatatttctcttaaacataaaggcagagacaatcactccagtatggagcaactgtctctgtattatcatctatcccataaaccaatcgccactattcacaatttgcttttttctaattgttgtaagcagatccgaatcagtcttgttacagaatgttcctccataaaactttacgctatgaaccacaaatgaatcctctgtcccggacatcaaaataaacgaaattttcttcccacttctatgaagctgttccagaagttccaaacctgtaccgcccggcatattgtaatccgaacagatcaaatcaactgatatgttttcaagtaatttcaatgcctcattcacaccacaagcctcatatatctcaaactgattccttagaacatgagatagcagccctaaaaatgtaacgtcgtcctctacaatcaacatctttttcaatatttttccctctattaacgataaattaaacattactctgagtaaacactctgtacagcagatggaagttccgtatactccacttcttcccaatttacaactccacgaattggagctacctccaagcgtaagaaggcgtcatccttgagaattttacttgtttcaaaagtaatatctcgtttcgtactattttcatcatagactgtcaatgtgtaagaataattcatcgcaccgtgcggttcaatttcctttacctttgtgttatcaatttgtgtataataatcagtgccgccagttcctgcaaaaatggcgataccaatacaaaggacaaccataaccactatcccaactccgattaatacattctttttgttcatcctataacctccctaaattatttcatttttttactacacatagtcaacttaaaacaaatcagcataactgctatgccaatacacactaatgtttttttcatgaataccaccccatctttcgatcgcttttgcattttcatcccttttattcatctagattaccaacctctttttcgctctgctttttttggcttcctttttgcttttacattgggaagtttttctgaatgtgtaaaagcatttaacagtacaacagaaagcaacaccgtgagaattaatatgatgattgccggaaaggtctgataggaaacagtatcatattctacaccacaatacggatcaaacaaaatcattgcagccttgatcggaaaccaatttagcaaagagccctcaaaggttccaaaataaccatatacgaatgcgacagcaacaccaatcaggctacttccaaaaagaaatgtattgataataatgagtggaagtaccgaaaggtaaattaaaatatttgtggctatgatccgccccgtggcgatcataatgctgtatgctgacattccggggaaatgcaggagcagattcataataacagcgagcgcagcgttgataaggctgaaagctatggagagaaaaaaaagaagctcaaattttccaagcaacagctttttaaagtcaaccggaaccgttaaaattgatttcagagtgtcgtccgttgtctccctcgaaataacaaaggaggctgtcagcataattaccacaggaaaaaaatacgtacaattttgctgaaccacctgatgaacaaaatagttaaaatcccagccgacagaggtactggccgtcgagtaaaaataactcataaatacggagagaaacatcatagcggctccggccttgattacagaatagcgttttattttccaaaattcagttataagattatccatttcatcacctcgtccatttcttataaaaatgcagcatgagcagtatcgaaaaaaccagcgttatccccagtacagcaaatgcccaaatatcggagggaaataacaaataagctgcttctgaaagatatctgtccgccaaacgtcccatcatttttttgctgctccaattcattacacataaagtcggaaatagattaattacctttaccagcgataaattcacttcaaccagcgataaaacactccagttcaaaatcgcatagaagaatgaaagaagcgtggaaatcaaataggatttgttgaaatagataatgaaaacgataaccggcaacgtggcaatcgtaattcctattccaaaaacaagactgaataccagcttaaatccaacatcataaatgattcccgcctttaaaacccatgtaaagaaaatcataaatacagtattgcaaagggtataaaaaagcccataaatcaatacaacgaataattttgccgcaatcagccgtgacgtagtgaccggaattacacatagatttttgaaagtatcattatccctctccataaagaacagtatggaggctagaatacccaacagacacggttccaaaaaaaccagaccatatccaagcatcatggtataagataaatcgaaccgtcctttcaaaaattccacacttgtatcatttcccattcccattttagaagtgtaaaccacaataagagggaacagcagagatagcaatataataaagggcacaatttttttacgcttcaattttgcaaactcaccagctatcaggttaagcaattccctcaccccctgttactttcttaaaataatcttccaaagtgtcttcacaaaggtgcgcttcaaacacctccaggccattttctacaaatgcacgggtaatcgctgcagtcggcagattgacatccagcaaatggatattatgctgatcagtaatcttaaaatatcttgtctgaaacattgtttcaaaaatgcgggcggcttgtttgctgtcggatactgtaaaatggatataatgacggtttttctgttctaattcagcaagactttcttcttccagcagcttaccatgatcaataatgccgatatcatctgctaggagagcaatctccgaaagaatatggctggaaatcaaaatggtctttcccctgacatcacataattctcggataaaagaacgaacctctgcaatcccgatagggtcaagcccgttaatcggttcgtcgagaaccagtactgccggatcgtgcatgacagccagcgcaatcgcaagccgctgcttcattccaagagagtattgcgaaaacagctttttatcctgatacggcagattaacaagttccagtgcgctcctaatgtagttggaacctttcagcccacgcagcttcgcaaaaattttcagattttccgttgcggtcaagttgggatagaagccgggggattcgatcaaacagcccacacgcggaagaattttcttctcgtttccataaataggctttccgaaaatcttcacttcgccggatgtgggagccgtcagacctaacaacattttcatagtcgtggtttttcctgcaccatttcgtcccaacagaccataaatacgccccttctttacatggatacttaaatcagatacgctggcctgttctccatacatttttgtcaggctgcaggtttcaataatgtaatcactcatagatgttatacctcctttttgattcacattgattgtaacatggcatccttgagggtatcttgagttaaccttgaatttaccttgagatttcaaaacatgaataggatattttcatcttttgagctataataagggacaaagaaaaggaggtgccgtatgaaagataaaagcattcttgctgtcgatgatgaatcagagctgcttaaaatgctccaatcggtttttgaacgtgccgggtacaccaaaatcaccactgcttcttctgggaaagaggcattagcgatatttcgggaaaatcaacccgatatggtaattcttgatgtgatgatgccgggcattgacggtttcactgtattaaaggaaatacgaaaaacgagtacgattcctgttctcatgcttacagcccgcggagaagccgatgataagtttttaggatttgaaaacggagctgatgattatcttataaaaccttttttgcccaaggagttacttctgcgtgttcaggcaatcttaaaccgcgcctatcctgaaaaggaacgtattgtatatctggaagcttcaaccgttaatttagataaggccgaagtttatcgtggagatgaagtgttttcattgaccgcaaaagaatttacgctatttgaaaagttatttgataactccggaaggattgtaaccacaggttcactatgcgaaactgtctgtggggaattctggcagggatatgaaaatacccttgtgacacatatacgccacttaagggaaaagatcgaggccaatccgtcaaaacctgtttcccttttaaccgtaaaaggattaggttaccggctccacatggtagtgtcaaataatctatgaaaaacagagctaaagaaaaaggctcaaatgaaccttgaaaattgcagatatttattccgataagctctccgagggctcagggcgttgccctgagaacctacaagggaccagtcccttgacccattttcgggcattgcccgaatctatcctcgccggaaggcaggaaaagggtgcagttgccccttttctgctggacaggatcatccgggaactttttgtcaacagactttcgcggcatatcctcacagtcggcatagccgtctgttgtggtattccacggttctattgacaaccgttccgctccggtgcagcagtcccgtttttctgtatattcagaatggtctgttgtccaaggaagatcagaagctgccacttgcctggcatgttatccgctccctggagcatgtctacctggttgagtactttatatcccgtatgtttatgtggtcgcaggaagttatagtaagccacccagagagccaggtcatagttggcaccgtcgatgttatcaaatccgttcgtgctgcggtaagaagccttgtacgtgcggttcagccgttcaatcatctgtttgaaagggcggtgttctttagaaacagcatcgtcgttggtaagtccaagaacctgggtaacggtgaaggtaaagtctttaccaaacttttttgcgaattccattgcagcaagaggatatgcactgtaaccgtccgcaacaaatttaaagttttccgggagttttgcaagcccatggaaagccatacgcatggcgaggatgcagggaccaaccccacggttatcggatacctgatagccgagaatggaacgtgtggcggcgttcatgatcagccagacgtaagttttgatgccgcggatcttgatataggtttcatcagcagtgaagacatcccctttctcgtaaggatactggtcgacaaagggcttgatacagatggcagcggttttgcagtagttagcgatctgctggtgggaaatgctgatgttatacaggtcttttaaagcctgtgacgtcttgcgcagggaaagccccagattgacgtgcagtgtcaggcataaggacatgacatgggcattgtgtttgttgaatttaagggaagaggcatttttaggcagggtatttaagcccatgctgaaaaaatccatcgtgaactcacggtagatgtaatggagcttatatttatttttaccataatcctctgcgagatctgccttgtcaacttttttgaggttgtgaaggtagtaaggacattcgggattgacgcatttatggacaatgaagtgtttcctgtcctttttgggaaccagggtgttgccgcaatgaggacatcgcagctttacggaagagaacctgctttcatcaggagaaaatctggcatcacagattttacacaggagttgtcctttggaaccgttattccggtagaggaagggtttgggagcatcacagcgtgggcaggtgcaggaatctggaatgtcacactctgaccggcggctgatcgggcggatctttttaccataacgcttttcgtagtaagggatgagttctttgtaagtccagtcctgacggaaatccgtgatcagagggagtgaatcaatcttgaacttttgatatttgggagagtgggaatcatcgaaggcccactgcttgagagggatatatctgcagataaaatttaaaagccagcagatttgttgatgttggtattgaattagctgaagtaaataaagtataatgttcatgagcattggctcctttcggggatgttggtttggcgattgacattataccagaaaagggaggtcaatgctctttttatttgtaaacctcctgtaattcaaggttttaaaggattttagaacaataaaaacagatagtttttgacactaccctccacattaagggggcggaaaaatgaaaccaattgaccgcttctttcgccactatatattatcagtcatcggaatactgctgctgttttttgtaatcaacattgtattaataggaatcctttttcttacttcctatctgaatggtgttaaggactccgtttttccaatggaacggttttcaaatcttattgaacaaaagaacggggcattcgcagttgatccggaagcaaatgacatcttagcacagacggatgcttgggctatgctgattgacgatgaaggtgctgtcatttgggaaagcggtctgccagaaggacttccccttaaatactctgcatctgaaattgcgatgttcagcagatggtatctgaaggactatcccgttaaaatctggaatcatccaaatggacttttagttgtgggatttcagccgggcacaatcagccaatactatatctcgttcaaaaccagatatttctggcctgctcttttcatctgtctggctgcattggtcatcaatatcggtgttatgattttcttatttttacgtaataccagaaaaatcgaaactgcaatgcggccaatcctggctggcatccaaaaactgtcacagggggaaacatttcacttagaggaaaaaggtaaacttgctgaaatcaatacaggattaaaccatgccagtgactatctggcaaaaaaggataatacgcgtgctgaatggattcgtggaatatctcatgatatccgtacgccactttctatgattttaggttattccagtgaaatagaagataaccctgacttaccagcagcaaccagaagacaggctgaaatcatacgaaaacaaagtgaaaagctccgtacattggttgcagatctaaatttaacaacaaaattggaatactctatgcagcccttccgcataaagccgcttgatcctcttgaactgatccggcaggtgataagcgaatttctaaataacggacttccggagggctatgaattagaactgtctggaactgacacagatataaaaactttcctatacggcgacaatttcctgcttaaccggatgctgcacaatctaatacaaaacagcatcacacacaatcctggtggatgtcagataaccgtttctgtaaaaatggacaacagaatctgtacgttttgtgtcgcagactctgggtgcggaatcaaggaatcatacctggcattactgaataacgataccagtattcccagttcccagacggaaacagccgaagcagaacacggattggggcttaaaatcgtaagacagattgtaaaagtacattatggagaaatccaattttcaaacattacacctcatggtctgaaaactgaaattcacttgcctgataaattcaaaggataattataaagccccagaacagcttcaaatgccgcctggggcttttcatacgctttatttcacctcaagtttagagagttcttgctaatactttaacggttctttataactattcctctcttagatcgctgtaatttcacagttattaattatctcaaccaaccagcgatattagtcgccacgacaatactggctactatgccaattaccagcgcatgttttttccatgtcaaacgtagatatccaacaaactcacgtattaaagcatttagcgtaaaataccatttcgtttttgccccaaatccaacacactttaacccttgctgttttgccagaattaatgctctgaacacatgataagccgttgtgacgataacaattttaggagcctctttatccatcaatttccttgaaaacagtaaattttcttctgttgatacagatttttgttccattatgatacgctctgcatctacacctttacctactgcatatgcagccatagccacgctctctggaatatcctctccaggtccctgcccaccggacataatcaatacagcattaggattggaatacagcaattccattcctctttcaatccgggccgcaagtaacggtgtgaccttctttccaatgattccagatcccagaacaacaatataatctgcatttctgttctttttcagatgaataaggttaagaattgcagaaagtgaatacatagccatcaatgataatacatatactgccgaaaaactgatgataacatagagcattgtacttaatgtattttttcttaaattgccaatcatcggccagacagacaggtagacatataacaagatagagaacagcatcgacaataaatttgacggtttcactccttcatgtttgatgacttttattccctcgatgaaaaacatgacgatcaaagctgccggaaacataagcatacagcctatcgccaaaacaaacaggagaatcagtattccaattaccacgtcatgtgctgccagccacctggaatattcagatagaataaaaaacaaggaaatagacaaacatatcatcatgaagaaaaaagaaaccccgctccataacgttctgggttcacgtgccattattcctgcaaatatacaaaataatatgaaaaatataaaaaatgtaaattgccacatagatgcctcctataaaaacgaacattttctatacaaactgaaagacttatataatgacttcaatgagatttacagctattatcattgttaacatctgtttggtctttcagttgctattcaatcccggacagcagaattttaccataatccattgaataatgccacagaatagccaaattagcgttttccagtttatactatatcctcaaaacagtttattataaaagaattgaccccataatcagacctcaaaccccactgaactccagattctctgagcgtctgcaacccgcaatgccctggatctctttccagaatgcctcgtagattcgatctttctctaatcagtctcccctcctgcaatcctctccgcttcctccagcggaaagttcggtatctcctccagcagtttcaacgctatctcttgcttcaaatcctcatccacgtaactctttacactgccgtccgactgcttctcttccactgtggcaagctctgtcatataatcatcgtaatatgccataatcttttctgttgcccatttctccccggcaacagctgctttgataatttcataagtcaatgaattctgctgttcttccatgcctgtacctccaagttgatatactgcttacagcataccatatctgtgcgaaaaaagcacccgccagtctttgctgacagatgctctcactccccaagtaggtattcataatctgctttttccttgggaaccacacgctttgggattttgtccatttcttctttatacgcctgaaaaaatccaacatccatcaaagtgtgcagaaaatcctttccctttgccttatcgcttctctcccggaattcttctccatagtccttttcgtatacttcattttccatgtttcgcaccctttcctgtagaacaatttaccactacgggtaggatgttaccatagatttcttattattcgttgtcatgaaagataactttctaggtctatattgataagtttttcaaacgcatcatatgatgatagttttattttacattcccatcaaaaaaaagaaaagcaacaaacattttgtctgttgctccctctatcaaccggaagttgtcattctataagttccgatgacaaacctttcatcatatcattgtatactgaactcccatcaagaatggttccaaatgtatcaacccagaatggtatatagtcacatctatttgctaccatctgcgaaccaatattcgttatagaagcagaatagaatggaataatatttcgtgtcagtaattctttggtcaatcccttcactaaatacgttcccaatcgggcatttctatattcttccataatatctatacctctttcccaaaaactgattagctgcttgcgctttcatatctgtgtacgccatatgtccaaaaagacaaggcaaaaaacgtaaaaatgcacacgatcgccaccccgaaaaggaatccttttgccgacaatgcccctgttactgcctgcgttggcagcgtcgcaatgattccgtacggcaatacacagtaaaaaataaacttatagattccataaaaagcgatccccggtattttcagacacaaatccacagccgtattctctattttcatcaggttatctacatagaacacaaaaaaggcaaagcaccgtatcagaagctccatatcgtagtacagtatggtcattagcaaaaccagaaacaaatatccaatgatattcgcatacgaaagattcacgccgctttctctcaccccatatccaacgatacaggcactgaagatcagaagcggtatggcgcccggatctactttttcaaaggtgatccgcaataatggattcactggtttggtcagatatagatccaattctcctgtctgtactttgtctggtaaggatattaccccaaaaaagcaaatggtcatgttcagggcatcaatcagggaaaatgttccaataaaaataaggatttccccatgcccccatccacggatactgtccacatgtccgtaaattgcctcgaaagcgaaaagttgaaccagaaaataactggtattaatgaaaaacggcgcaaagaatcccaaccgaaatgtcatgatatgggataatctgaatttgatcagttctgatataaattttaaattatgtttcatattcctgctccatcatatttgattcgatcatgttcataagttacctgatttaaaacaagaaagaccatgcaccacacacctaagacgattaagcctgtgactgcctcctcctcacatttccctataaacagcatactgggaagatatgtgacataatagaaaggcagaaatctcatgcctgctgtcatccattccggtaaaagcgcaaggggaattaccgccccggtcacaaatgcggaaaggttatcttttatcatgagaaagatgctgatctcctcaaatttcaaggtcaaaatcccaagaaagtaattgagcagcgccataaacaacagtcctaaaacaaccatgatacttccgcataacaggatctttatattggctgtatgcacaaatggaatctggaacaaataaaaccacagaaacgttgctaaaaaaccaatgcccgcagaaaacgcaatcttccctgcttccatcgccacaaaatacccctgtgtctgtaccggtatcaccatatattttgaaaagataccatttctcagcataccggtcatctgccggctgatctccgcagatttttccaactggaataaataggagcttatgatatagtaagaaatcatggcctgaaatcccaagcccgcgatctgctctttaccctcaaacagaatactccataagatccatgcaaacagtatcttcgccaccgccagaatcacgtctactaaggtatccgacctccagatcagctgtgctttcatgtatgccttggcaatttctaaatatttcttcatgtcctatacctctttatagatacgctccacgactgagcctatttcttcttcctcaattccaatatcccggatcggataatgaccgatataagattccagaactttttctgcgttctgttttggtatttcaagtaccagtttgtcattcgctttttccaatactctgcaatcatccggcacatcaggctctacactgtgttcaaagtatatcgtcattttcttactcttttgataattttcaaataacatatccgtaccgccgtcatatatttttctgccgtgattcacgactatggagcgtttacacaataccttaatatcctccatataatgcgaggtaagcaaaatggtagttcctcttgactcattcacatcttttaagaaagtccggatctgcttacctgccacagcatccagtccaatggtcggttcatccagaaacaatattttcggattatgaagcaatgcaacgatcagttccatcttcatcctttctcccaacgatagcgttcttacctgtacattcatcagttcctgcacctgaaacagatccacaaaaaaatccttgtttcttttatactcgtcttccgggataccgtatatttctttaaacagccgcaacgtgtcctccgttgtcagttcaaaaaacagctggctcttttgacccataaccaccgcatactgctgcttaaatgctttttccaatttattcggataaaatcccatcacctgtatcctgccgcttgtcggcgcaataatcccggtcaacatcttcaccagggtcgttttacccgctccgttcggcccgatcaggcctacaaactcaccctcatttacatgaatatcaaaatcatctaccgcaattttttcttcatatttcctgtgaaacaggcccttaatacttccggccagaccctcctgctttttataccgcttatactttttcgttaaattctctgtctcaattatcttcatcttgaaaacctccagtttaaatattcaatgaaaaaacataaaaaaatgtggtttctgcctatcattacatagactgaaaccacagatgtatatatcttaagatgatgaaaaaagcaaaacatccccataaaaggaaagcagcaatgacctaaaaaatgcagcccatttgctcgcagaaataaaaaagcatgacaccacagtcatacttttcccgctttcttatccatcataataagacaattattcccggtgtatgcagtattctgtaaggcagaaacaaccggcattcaataatgccaaaaagggtaacacaaataaagcactctattccgtgcttaccctcttataaaatttagttgtcctttgtcattacagaaacaattaacatccacatacctgctctttcttgaaatatggtcttatattagcttataactttgtcaatgtcaagcattttagcctggatacatattttttatccagatttggagaggcgctaatttttcctcaatacaaaataggaatcatactttgttccatcatgccctatcagcttttcctctgagcgtataaatcctaaatttttcaacgccacaatacgttctgccgcagagggaagcgcttcgtagcgatcttatcacaatgaaacaggctatatgcaggttccattatcaatcttaatatttttataatctcgcttgtcatttcataatcactgtgaatgtccagtctgagcaaaccgcagtttgtaaaataatcatcggcgtctctgcggaaaagctctattgttccaattgcttcatcagttgcttttgacacaattgtccacctcacaaatccttctctattgtactcgaaaagccagtaatcaatcgcctgtttcattctgctttccgttgtataatagaaatcatctccgccacaattatcactattaaaaaaggggacagcccttttatcagaataaacctttaataaatccattctatcctcttggcaaaccattctcacatgatagtcctcattctcatattcaggacaatttttataaacatccaccattctgatcctcctccgtaaatttcgtcttttcatctctatctatggcagcatccttagttctgactggaaatactgctcctgaaatttttccaattctacaagccagaaaagctaaaactcatatcttgtcccatgtgagagtaacagtccatctgttaattctacacatagaattatcgtattttcatcatcaaaattgttatgtccgttatcaatccattcagcaaagacatttttcagtttttcagcaatcatacaattcccttttttccaaaataaccccaattgctgccctttccatatgccgtaaaccgctcaccagctattgcaacagcaggattgttttctatatgtttgattttatttgaaagtgcatatgtaataatataaaatacaccgttctcatagtaggcatttacatatcacacataaggcacctccttttcaatggttgccaacgcaataacagtgtcttttccaaaacgttccatcattatttttttagcttctcggctcatttttttcattaattcgttctcctttgcaacttttcatttaactgtttagcagcttcgttaaatcttcaaaagaaacatccatttttacagacacttcatctatggtcataccagaagcaaggaaacgctttataaccattttcatattttctccaacttctatgatatgtccgtccaaatcataaaatcgaatgacacgttgcccccaactgtgttcaattacctcacccaaacactcaatattcggatattcttttagtttatgtaagaaactgtcaaagtcctgttcctcaaaacataattccacattgttagatttttttaatatgctttctttgggtaaatgaacaagccagtcaaagtcctgctgtaaagctaaaccgcaggtaaaagctatatttcttccataatcctgaaatacttccaatccgaataaatcctcataaaactttcttgcagcgttgatgtctgctaccgatataaccgtacaattgtatttcatgtaagttttcctttcttagagattattttttcttccggagctttagttcaatattctttcgctttgctgcgttttgaaacacccccgcagcataagaacttttttctttgagtgtcaatctttccagttccgaattacccttgatttgcaaaagtatctcatttatttcctgcaattccaaaagattgaccgccacacaaaaaagagtctttttcctgccatcgttatagttggctaacagtaaattcaataattccgtcttttctgtctgctccgcattgtatgcttcgatccctatctctcttgcttttttcaaatcagcttttcggttactgtgtgtaatgaatgaatcaaattcatctatatgctcatacttctcacaggggtactctctgcaccgaaaacaatattccacaccatcatgttctaaactacactttgcaattttgcaggattgattcccctctccgccaccgcagccgggacaatatttatttaagtgcataggacataatccgcagttcaaaccacaaagagaaaatagctgattgtccctatggaaaccttttatacgctgtacctcaaatctcaaattttaatctggcagactaaaaatctacacaaattgttttattaagttcaaccattccttattcatattcaattccctctcaaatatgaatttatgaatccttttcttcgtaaggcttattccaagaacctatctctattaaattaccttcaggatcagcaatataacaagttctctgtccccaaggttcaagttccggttccagtacaggagtagcaccgttttctacagctttactaaatgctttatcaacttcttcaaatgtatcaacataaagtgccatttcaaaatgaccgttgaatcctttgatataatcatatctgcgattggtcattttttcaaagtcatttctgccgtacaacagaaacaacgtcccatcttttacaagatatacattagatgtatcttccgcttctttaatctcaaagccaagtacatctctgtaaaagcgaatcattttcgccatatcttcaacaaataatccaaaaccgtccaatctcataatacaatacctccaaattccgattgaacaaaatcgctgcgcgatggcctgccaaggctgtggcatagcgattttctgttttatataacaaaacagtggaaagcaagtcctaaaagtagtattgttaaatcaccacaaaataacaatcaaacaggatcgacctctccactgcctatgaaaagaataccaccattccacttggttggcaagcggttttatgaccccaatgcccctccgtataaagcagtgtttctgataactactgattttatatggaggattttattatgtatgaaaaatatttagaacagcttgaggaagccgggaaaatccgtaacctcaaagaacgttccatcagttgctataaaaactatgtttcttactttctgaaatatcagaataagaatcccaaagaacttacctgtcaggatgtcagggcttttttgcttgcaaaaaaagaggaaggactgaaagccacaactctgaatctttacaattctgccatccgttttttctatcgaaatgtcctgcatatcctttgggatgacatcacagttccacgtatgatcctagaacataagcttcctactgtactgactgcctctgagattgaccgcctgttagatgctgttgatgatattaaatataaggctatgttcgcagtcatgtattcctccggcatgagagtttctgaagtaatccaccttcactatgatgacatttcccgttctaatatgcagatccatgtccgggatacgaaaaaccggatggaccgctatactattctgtccagacgttgtctggatatccttacacaatactggtttgagaaaggacgtccccgtggcatcctgtttccaaataaatttaccggtaattacctgactgtcaatactctggaacaggtcatgcggcgggcagtagccgatgctgaactttcaaaggcggtaaccccgcactgtctccgccatagctttgcaacccatctgatggaacagggcgtagaacggcagaatattcaggcactgcttggacaccgtgacccgaaatctacggaagtttatcttcatgtcagcaacaaatccctcatgggcattcaaagcccttttgacaggaaagaaggtactggccatgaataaacccaccgtccaggatattttccgacgtttttatccggcataccttgaaaagtattctccatccccggaacaggcaaaagctgtccggaacatcctgaactgcaaaacaggagcctatggtgcaaatatcagtgtatgtgaagactgtggtgctgtccagattcattataattcctgtcgtaaccgctgttgtcccatgtgtcaggctattccaaaggaaatgtggatggatgctcgcagagaagatgtacttgatgcaccttatttccatctggtgtttacagtccctgacattctgaatccggtcatttacagtaaccagaaactgttatatgacacgctgtatcatgcggcttccgctactattcaggaactgacagccgacccaaagcacctcggggcttctgttggttatatctgcatcctgcatacatggggctcagaaatgaattttcatccccatatccatacgatactgcttggcggcggcctgacaccgaaaaatgagtggaaagacaatggtacggagttttttctccccatatgggctatctccaaagtctttcgtgggaaatatatggatgagttgaaaaatctctggaatacagatcagcttgagtttcatggaacagcagaaaaataccgtaattattatgaattcaaagagcttatagattcctgttatgacgcagaatgggttccttactgtaagaaaacttttaacggtgcacaatctgtgattgattaccttggaaagtatacccataggatcactatcagcaatcaccgtattctccgtatggacaaagaaaatgttactttttctgtcagggattaccgaaaggaaggacaatggaaagaactgacactttccggtattgaatttacacggcgttttctgatgcatgtgccacccaaacgctttgtcaggatccggcattacggacttctatgttcccgcagcaaacacaaaaaactcactttatgccagaatctccttggatgcaaaaaatatctttcaaagctcagggataaagagatgccggaaatactgaaacagctatacgggataaacatctgtgtatgtaaatcctgcggcggacatcttgggaagccccaacttcgaatgccgcaaaggtgttaaaatacactttctttatatgttttttaagcctcaaagtcagaggttttattgttgtacctatttatctgaaaacacttgatttctgtagtgttagtgatttcatgagctgtcaccagattgctcacatcagttgacgctcacttgcttaactttctgtcaccagtcagttaggcaataccgcctgtttccaggcggtacctgctttatgaagttaccatcccaagcatctcgtgttccacaacgaacttgatcatataatcatcgatcaatcgtttctgattttgaaacgcatacatcagagctttttcacagacacggttgatcatccgtgggattcctgcagatgccttatggatctcatccaatgccttggttgtaaatatttcctgcccgcatccggagtaatccatgtggcttgcgatatattgttctgtttcagaacggtcaagatgaggcagcgtacagtacatgtcaatgcgctgccggatggcggcataccgctgtagctttagtttattttcccacagttctgtctgcccaactaaaacaagagccatgggactcatggaatcaaaccggtaattgagcaaaaagcggaattcttccagcgtctccttctctaacaggtgggcttcatccaggatgcagacaacctttttacgctgtacgccccggattacctcgatctcctgttgcagttggcgctttgaatcaccgcggtagaaacgggattccagccccaactgatccagcagacctttatagaaccaccttggggtcagttttgagtctgacagataaaggatgatgtaatcctcttttggaagttccgaataaaaccggcggataagcgttgactttccacaccctgaatcagctgttacaacagcaaacatctggcggtccgccacataagccagacggccgagagtttcccggaaagcattggattcgaacagtttttcaggagggacatcccggacaaacggtgtatgttccatgccaaagaatgattcatacattagtcattcgcctccttccggtaagatgcaaatgaaatcgcatctgccatctggtacttactctgtgtatatttcgtttccagcgcatccagaaaacgggaagttgtcggcacttgtccctgcatggcagccggaagtgttgcctgcctgtcgcaatacggtccaatctttacaggacttgcctgaaaaggttcaaatccgggataggaaacggtgatgatctcaggatttgccggatcataggagatttccaccgtatatccgatcagggcaggtttggtttcatacctttgcccacggaaactgatacaggcacctttatccacttttcgctgctcatggtgcaggaaagcttcggctacaacggctgtatccaaaaaagtcagtggacggctgtcccggttccattcctgcagtggtgatatcccttcttccggaatggcggcaccgaggctttcgtagtattctgcaatgccatcatgctttttcttgtggtaatactcatccaggtagattgcccacaaacggttcagttcctccaatgttctgatatttttcagctttgattcccggataaaagcatctaccacctgatggaacttttcgattttccctttacttttgccggatcttggttttgcatacatcacacggatgcccagccttgcaagggaagaacggatctgttttgcgatatactgtgttccattatcaaagtaacaggaatcgaagattccataccgggaaatcgcttggtgaaacgtatcttcaatgattgattctccctgattgtcataaaaccgggatgatagaagatacctggaatggtcatcgattgctgaggacaggtaagtctgtaccttagccccatttcttccgattggaagcttgggtccatacttgatgtccgcctggatcagcatcatacggtgcggtttgcaaaagcgtttggaagaactgtttcttgcatcctgatacatttgcatctgcttttgtccgtaaccagccttatagatatggcgttccaaagtagaacgctttaaagtaccgggtaccgcaagcccttccgtttccagaatgtagatgatctgggcaaccgaccgctccggaacctccttgcgaagttggattgcctgttccaacaggaacgaaaagttttccggaagtttttgtgaccgatgtttctcacggtcagcaggttttagccctgtaaactgcctttccgaaaaagctttttcatagcggtaaagggaacggacagatatgttgttttcctctgcaatctttttgcgaagctggatacgctttgcatcatccagaccagtctggagaagcggtgaaatcaattgaaaacgcctgagggcttcttcctcttgccattgttgtctgtttattgttgtattcataagataatgacctccttttgagtccaatataccctttggtactttgacagacgatgcaaagtaggtgcataagccttaccagcggatcgggactaaaaatcctccgctgttgtaaatctggcgtaagatgatttccaaccagttttgatattgattcctgaaaaaatcgagcagtgaaccaggggaaatcctctcttcattataacccagcaggaactcccggatcgtccttaaatatccgttgatacgttcaagattttcgcagaaccattgcagccagcggagcatggtagcgcaggacgggtagtcttcagaatctaagtcttccggctgtacaacgccatccagcaccccggagatcacttctgtttcgtaatgcttgtacggaacaagacaatccggaagttcattatgataagagtggcagttcttacaataaaaccgccggatgatcaactgatcttttaaaccgccttcctttctacggatgcgtgggcgtgaatcccggtaacgaagcgtagcctgacagatggggcacatatgggtggtcacactgctctcaacaaaaaacaccaaaatcctccttgaggacaagtgaataatctgatataataaccatggtttagtgaccagggtctcagagtacacaacttgccgggagggtgctctgagaccttttcctttttgtatgctgatgacagtatacaggtcaattcagagacaggcaagtaaatcagtattttgataatttatgaggtcaacaacatctgtagcgtctgcacaggaaatcctgtataattatggataagaagaaaagattgaaagtccataggtagcagctacccggacgctcactttgttcaattaggtcaaatcgaaaatggagtaaacgaaggggcagttcactggaatgccaaaactgctttttcgtttaccccatcatcgattctaacctaaagaatttgtttctttatttttagcatccagtatacctctctgctatatttcgcattcaataaaagtatactatccataccttactgcaatattactgttaggctacaattttgtaggaatagaaaaatccaagataaacgggataccatttttcacccctaaaagcgtattatccccatgctcttcttccaggcagcttcgtagattgcgaattatgaaagaatcccggatggattcaaacactattaattttctctttcgctctcctctccgcttcctccagcagtttcaatgctattgcctgcttcaaaacctcatccacataacacttcacatttccatccggctcccgctccttcactgtggcgagttcatccatatagaaatcgtaatgtttaagaatccgctccattgcccacttctccccggcgacagctcccttgatcgtttcataatccagtaaaatccgctgatcgtccataactccgtacctccggctaattgatttcttacagcattccataacttcatgaaaaaagcacccgccattcctcacactaacagatgctctcatccttaatacaccttatcaaaatatccaatgaatatggtcatccgcaatagcccgtccttaatcgaaaaagtcacattctccaagcaggtatccgtaatcctctttttcctttggaaccacacgctttgggattttatccatttcttctttgtatgcctggaagaatccgatatccttcaatgtgtctaaaaagtcctgtcctttcgccttatcacttctctcccggaattcctctccgtaatctttctcgtatactacattttccatgcttcgcaccctttcctgtagaacaatttatcactacgggtaggatgttatgatgtcttgttcttttccttctctgcatctttgattctgtaataatcttccatatccagactcaattttatataagtatcaggttttaattttcggttgctcaagaggcacacagtttcaacagatatatgatgatttctaataagcggtctattttcatcactgctctgccatcctttcgtttctctcagatatgaatctggaatttatctcatatatctaaccattgaataaaagctgttttatctgtacagttatatcccgcatttttataaaactctaacgtcttttgttcttttgaacctgtcagcagcatcatcttgtagcaattattatttacagctatggtttttgcataatttaacccattgtgctagttaatataaaaaacttcaacaaaatatgttatcctatagctgtacaccactacatgctatgaaaggaggcacacataatgttgaagttcaaagatgattataccactctcacagcaacttttgaagattttattttgcttgtttatacagttattgatgatttgtatcaacggtctgtccctgtatgcgtttcccaaaggcggaatgtgcatactgcaaagatgtctgattctgaaataattacgctaagcatttgtggtgaactcattggtatagattctgaaaaggcatggtattctttcgtgaaacgtaattatcgacacctttttccgcatctatgctgccgcacgcgatttaaccgaaccagaagagctcttttacaagtaacggaactgctccggcagaaactggctcaatccttcccaatacctgacagccgttattttgtaattgacagcttccctcttccagtctgcaaatttgggcgtgcgcgttactgccgttccttccgcgaggatggcgcaaattatggaaaatgtccatccaaaaaggaaacttatttcgggttcaaagtacatgcccttattaccatagaaggttatgtaactgcttttgagattacgcccgcatctgtggatgaccgggaaggactgcgcgaccttgcagaaaaccatctgcgggttacaatatttggagataaaggctatactggggaaaaccttttgcaggatatgcgtgaaaaaggtatctgcctgatgtctctcaaaccatctaatcataagaacaactggccaaaagaaatacggcagctgatcttccgcttccgtcgtagggtggaaactgtattttcgcagcttagcgaacagttaaatgcggaaaaagttctcgcaaaaagctttcatggattatgtacccgattacagaataaaattctggggcacaacctgtgcatggcattcaacagtgtatttggagaacaatgtgatattggacagataaaacatctcatcttctaaaaaagtgctttcaattatataggggtaatctgggcaattttgagtcgataagcagtcgtattttaagtagcacaatgagttaatttaagcattccgtagcataaccatgccctctatagtctgcatgagtaacaacattttccacaaacgcatacggatgtatgtttcttgttaaatttggaataatcacacaaacgcacgaagaaacaatctttccgtcaacaatatttacaataagatgatgatttttatctgctataatttgattccaaatgaccgataaatgttccgattgttctggaacagtctcttcatgaagatataaatataaattcagcacttccagcaaatcttcctgtttcgcttcacgaatcattcttatcacctcaactcatttaattccgtcataaaatatttaatccataaatttcattataacgaaattattacattctgatttccgacttaaaatactgttcctgaaactttatctgctccatgatttccttctcactaaaagaaagattttcaggtgcaaccacccatttttcttcaacatcatccaatcggtgtacaaccgcagtaatctttcctgtaaattctttaacagcttcatttacaccaacgatataagcatcctgctcctcaccatcaggagccataatgccttcgatatatccgtagttaacaggataatacaggtctttatgttccggatgataacttccaagcggtctgtcaacgatgacttttacaatctctccaatcattccagcctctttttctacaaaaacgttcaaaccgtctgatgcgtctgtccacatcgcgctgcagtgcctttgtcagacgcaagtccggctcataccagatattttttagttccagctttccctgctttttatcataagccatttctatcctgcctgcaaatctgtctccatagagaatcggcaaaacataataaccatatttacgctgctgcttcggcgtatagatttcccatttataagaaaaatcaaaaactgctcctataagcttcctgtcccagatcagattatccagcggtgcaataaattcacagcgctttttcatcgggggatttttcaatataaattctgcaagtcctgcatcctccctgcggcaatacaacggctccccaatctcttccacttttacttcaataatcttctcttcttttaacagcatctcgaatatagcatttctctgtgcagccttaagtccctgtatacccagccatgcgtcagaagcacggttccacaaaagacccaccgaaccaatgcgctctgacaccagccattttctataatcaaaatccgaaggaaaaggctctggttgattcaaaaactctgccggaatgcaattttcaatcagatcataatatttcagtgttccgctcttatgatggattcccagttctccgacaaaatacatatgttccaacgccgctctcgacaacctggtatcactccaataccaggagacctttcccgctatgtccaaatctgcgctgcacagtggtcccctccgtgcaatttcctcacgcacccgttcctgtacttccacaatttctgtatggcttctctcccagcttcggtgagcctgccgctcccggtcaaaatatttccagttctcaattggaagaatcgcaagatttttatcaaaatagtccaccagtttccgatcgatatataaaagctcataaagcatcgtcttttgatagtctttgattctggactgcaaaaccagatccgcatttcttccacagacatccaccggatcaaactgaatgcatcctgcctgccggataaaagaaaggatgccttcttttccaacaaatttataatcccccagcaagccatgctttaataacaaaaactgccgcgcctgttttttcgtaaaataaattctgtccatttgccctcccaccgctaatacagaaaacggcagaacccgtcatcatactgcagcaacagaattaatccataatgtttcctatttcttattaagaacccaatagtatttatactgagtgccatcatgtccggtcagcgcctgatctgattcttcaaaccccagtaccgccaatgcctgaatacgttcttttgcggttggcactgctttcgttgccagcatccggcaggaaaacatttcaaacgccggagtgcctatctgttgtaaaatttcctttatcacatctgctttttcgtaatcacttcgcagatccagacgcagcagcccgcagtctttgaaataatcctcagaatccctgtggaataattcaaccgttcctataacttcttcctctttatggttgaaaataccccatctcacaaatcctcttctttcatactcccaaagccaatagctgacagcctccctcattctttccaaggatgtataatggaagtcatccccaccgcaattatcactattgaaaaaaggaaccgccttcccgtccgaataaaccttcagtaaatcctccgcatcactttctgcgaccagacgtaagcagtattttccatcgtcaaaaaccgggcactcctgatacacgtcctcaaaagttccctgatctccaagtaacactttcacaaattcactcatcttatgctcctctcttttttaccttccgccatacgcgcagaatactccatgtgccatagaacatctccatcctaccatacttctgcgacagctatatgtcgtaattagataaaaatttttgagcagtctcgatcagttcatttcggcaggcttccggagaaatgacttccacacggtttcccatactcaaaagcagggctttccacgagcgttctccaggcggaacctgaatccatattcttgatttttcctccgaccattcttctatttggctgtccggaaagtactcttccatcaggcacgtatctttcttatcaaacgctacctccagtgtaatacaagtttcaccatatgccctgtctgactgctccataagctcctttaccgccggatgctttctgtcagacttttccgatgtaatttgaggcttgcggattcgtgcaactttaaaggtacgatacgcctcctgtggaacagaccatgcaaataaataccatgaataccatttatactggatagcaagaggttcaaccaaccgctgtgtttcttttccctgcgcatccctgtagaaaaaatcaaccagtgcctttgtctcaattgcccgtttcagcatctgattcactttttgcacctgttgattctccatggcgattccaaaatcaaaaaagatactctgttcctgatccctgtccaaaagtgcatgatacttttcaattaaacctgccagcgtttcatttgcatatgaggttgccaggctttccagtgcctgctgaatcaactgctgttcttcctggtggatattgcagtttctaaccttatacgacggcaaaatggagtatcctccaccctttccctgattggaatatacaggaatccctgcttctgcaatactgaccatgtctctctgtatggtgcgaacagaaacatggagccgttctgccaggtctctggcggatacattctcatgattcaaaagataaatgacaattttcaacagtctgtctattttcatttgaacagctctccctaatgatatcgattcgcagtttttgttttagcccaatcaactgtaattttaatgtttgtcatttttcttcagtcttattttgcctgttactttttctactaccagtttaaaaacttttgtacggggcattactgccttattgaacgaaaattcttcttgaccataatgcttcatcaaaatatataaagcattgcacttttcatcatcagaaagcatttcaacacgcccttgtccaataacactctcatattccattgtgcaacttccgtgttcaacctctgtcactaatttatgttcacaatccatttcaaaactggctctattgtccttttcaattaaatcatattttgtaccctccatagctccatgaaaatacaactcgattttacctttttttatacacattccaaaattaagtggtaatatatatgggtagccattattatttaaggcaattcggcatacatcacatttttccatgatagctacaatatcttcaaactcttttacttccctatctgaacgacgcatttttacctactacaatattgcaaataccgatttgtttattcgtcccatgtattatctgtttagaagttttgtcaaatcctcaatagaagcgtccattttcacagaaacttcttccatagtcatgccggaagcaagaaaacgctttatcaccattttcatatcctcgccaacctcaatgatgtgtccgtccaaatcgtaaaaccgaatcacccgctggccccaactatgctcgatcacttctcccagatattcaatatccgggtattctttcaacttgttcagaaaaccgtcaaactcctcttcttcaaaacacagttccatattattgggttttgtcaatacactttcttttgataaatgaacaagccaatcaaaatcctgctgtaaagctaaaccacaggtaaaagctatatttcttccataatcctgaaatacttccaatccgaataaatcatcataaaactttcttgcagcgttgatgtctgctaccgatataaccgtacaattgtatttcatgtaagttttcctttcttagagattattttttcttccggagctttagttcaatattctttggctttgctgcgttttgaaacacccccgcagcataagaacttttttctttgagtgtcaatctttccagttccgaattacccttgatttgcaaaagtatcccatttatttcctgcaattccaaaagattgaccgccacacaaaaaagagtctttttcctgccatcgttatagttggctaacagtaaattcaataattctgtcttttctgtctgctccgcattgtatgcttcgattcctatctctcttgcttttttcaaatcagcttttcggttactgtgtgtaatgaatgaatcaaattcatctatatgctcatacttctcacaggggtactctctgcaccgaaaacaatattccacaccatcatgttctaaactacactttgcaattttgcaggattgattcccctctccgccaccgcagccgggacaatatttatttaagtgcataggacataatccgcagttcaaaccacaaagagaaaatagctgattgtccctatggaaacctttcatacgctgtacctcaaatctcaaattttaatctggcagactaaaaatctacacaaattgttttattaagttcaaccattccttattcatattcaattccctctcaaattcgaagttagcaaataatttcctgacgttctccctgaatccatacaatttgcccatcagacaattttatcgaatcgttattagttatttccccgcaaggatttcctatttcaacgtgtggtatcagcggatttgttaaatagcctaatccatcagcaaagtttcctgcggcaatcatacttcctgcactaatccccagatataccaacccattctctattgcctgttttaaaggttttgaaaaccctgttctgtttacttcgttcagaagcactgaggcattgccaccgcaaaaaacaattgtgtcatattgagaaagttcttcaacattcattaatcgaatctgtgtgggtatatcatcaacataacttgaatatgtccttttgtatccgtcggagagcagaagtgctaaatcatataaaaagatattacttataggtatacccatactcataagtcgctccaagcatattacaataccttctcttgcggcatcattttcaattgcagcagatggaacaaaaatcacttttgtattttgaggttctttgccgatgcattcccaaaataacttagtagtactttcattcaaaccacttgaacttaaaaaaagtgttctcattaactttctcacctctgattacataaattccgattgaacaaaatcgctacgcgatggcctgccaaggctgtggcatagcgattttctgttttctataacaaaacagtggaaagcaagtcctaaaagtagtattgttaaatcaccacaaaataacaatcaaacaggatcgacctctccactgcctatgaaaagaataccaccattccacttggttggcaagcggttttatgaccccaatgcccctccgtataaagcagtgtttctgataactactgattttatatggaggattttattatgtatgaaaaatatttagaacagcttgaggaagccgggaaaattcgtaacctcaaagaacgttccatcagttgctataaaaactatgtttcttactttctgaaatatcagaataagaatcccaaagaacttacctgtcaggatgtcagggcttttttgcttgtgaaaaaagaggaaggactgaaagccacaactctgaatctttacaattctgccatccgttttttctatcggaatgtcctgcatatcctttgggatgacatcacagttccacgtatgatcctagaacataagcttcctactgtactgactgcctctgagattgaccgcctgttagatgctgttgatgatatcaaatataaggctatgttcgcagtcatgtattcctcaggtatgagagtttctgaagtgatccatcttcattatgacgatatctcccgttcaaatatgcagatccatgtccgggataccaagaataggatggaccgttataccattctctccaaacgttgtctggatatccttacacaatactggtttgagaaaggtcgtccccgtggcatcctgtttccgaataaatttactggtaattatctaacagtcagtactctggaacaggtaatgcgacgggcagtagctgatgcagaacttccaaaggcagcaacccctcactgtctccgccatagctttgcaacccatctgatggaacaaggcatagaacggcagaacattcaagctctgcttggacaccgtgatccgaaatctacggaagtttatcttcatgtcagcaacaaatccctcatgggcattcaaagcccttttgacaggaaagaaggtgctgaccatgaataaacccactgtccaggatattttccgacatttttatacagcataccttgaaaaatattctccatccccggaacagtcaaaaactgcccggaacatcttgaactgtaaaacaggagcttatggtgcaaatatcagtgtatgtgaagactgtggtgctgtccagatccattacaattcctgccgtaaccgctgttgtcccatgtgtcaggcagttccaaaggaaatgtggatggatgcccgcagggaagatgtacttgatgcaccttatttccatctggtgtttacagtccctgatattctaaacccagtcatttacagtaatcagaaactgttatatgacacgctctatcatgcagcctctgctaccattcaagaacttacatcagacccaaagcacctcggagcttccgttggttatatctgcattcttcatacatggggctctgaaatgaacttccaccctcatattcatacgatactgctcggcggtggactgacaccgaaaaacgagtggaaagataatggtacggagttttttctccctatatgggctatctccaaagtatttcgtgggaaatatatggatgaactgaaaaatctctggaatacagatcagcttgagtttcatggaacagcagaaaaataccgtaatcattatgcattcaaagaacttatagattcctgttatgacgcagaatgggttccttactgtaagaaaacttttaacggtgcacaatctgtgattgattaccttggaaagtatacccataggatcgctatcagcaatcaccgcatcatccatatggatgatgaaaatgttattttttccgttaaggattaccggaaagaaggacaatggaaggaactgaccatttccggcattgaatttatacggcgttttctgatgcatgtgccacccagacgttttgtcaggatccggcattatggacttctatgttcccgcagcaagcacaaaaaactcactttatgccggaatcttctcggatgcaaaaaatatctttcaaagctcagagctaaggaaatgccggaaatactgaaacagctatacgggataaacatctgtgtatgtaaatcctgcggtggacatcttggaaaaccacaactgagaataccgcaaaggtgttaaaatccaaatcttttatatgtttttaagcctcaaaatcctgaggttttattgttgtacctatttatctgtaaatccttgatttctgtagcgtctgcagaggaaatcctgtataatcatggataagaacaaaagattaaaagtccataggtaatatctactcggacgctcactttgttcaattaggtcaaatcgaaaatggagtaaacgaaggggcagttcactgaaatgtcaaaactgctttttcgtttaccccatcatcgattctaacctaaagaatttgtttctttatttttagcatccagtatacctctctgctatatttcgcattcaataaaagtatactatccataccttactgcaatattactgttaggctacaattttgtaggaatagaaaaatccaagataaacgggataccatttttcacccctaaaagcgtattatccccatgctcttcttccaggcagcttcgtagattgcgaattatgaaagaatcccggatggattcaaacactattaattttctctttcgctctcctctccgcttcctccagcagtttcaatgctattgcctgcttcaaaacctcttccacataacacttcacatttccatccggctcccgctccttcactgtggcgagttcatccatatagaaatcgtaatgtttaagaatccgctccattgcccacttctccccggcgacagctcccttgatcgtttcataatccagtaaaatccgctgatcgtccataactccgtacctccggctaattgatttcttacagcataccataacttcatgaaaaaagcacccgccattcctcacactaacagatgctctcatccttaatacaccttatcaaaatatccaatgaatatgatcatccgcaatagcccgtccttaatcgaaaaagtcacattctccaagcaggtatccgtaatcctctttttcctttggaaccacacgctttgggattttatccatttcttctttgtatgcctggaagaatccgatatccttcaatgtgtctaaaaagtcctgtcctttcgccttatcacttctctcccggaattcctctccgtaatctttctcgtatactacattttccatgcttcgcaccctttcctgtagaacaatttatcactacgggtaggatgttatgatgtcttgttcttttccttctctgcatctttgattctgtaataatcctccatatccagactcaattttatataagtatcaggttttaattttcggttgctcaagagacacacagtttcaacggtattacctttttcccacaagagccgccttacctcttgaccatcccgatatattgggaaattaaactctattgacttcaaaggctgctctgactccccatttggatatatctgaatttcttttatgagataagtaataaggcttttcttttcctcgtcacttattatatcatagagctttccgaaattcagcataagcttgtaaatattgtccagagtgattgcttccatttcgatagaactttttctcagctttgcatcttcaatccgttcttccaactcgacaatcgtatcatacaatccatcaagccttaatgtcatgtcgtggatttttctttctctgaaacgagcatcaataggcagattatcaatctctcgttccagacgggctttattcaaatctacttctttcagcttgctctcataattggcaagttccttatcaatagctgttgtatcggtctgtacgccaatacgcttttcaatctcttttgcaaaatacttatcgcttaccaattccttaacagcttcaattacaagcggctcaatatctgtttttcttagcgatgctttataatcacaatgatgtcctcgctcctgcttatttctgccgcaaatataatagtaaacctctttgtatgtgccgtctttatttgtccaagcgtgtttgttcgtatacattgaacttccacaaaggggacactttaatatccccgtcaaaaggtgtgacctatccttaccgattttggatggctgtttaattcctgtcgccatacgctttgcgtgaaccttttgccacaattcctcgctgataattccttcatgttgtccatcttccagaatgtaatcctctgcatgaacctgcttatattcattttttgtaccttttaccttttctcgtgttcttctgccataagcaatctttccacaataaacaggattatctaatatcaaccgtataaaatgactgctccaagtttccaatgtgccgttctgacgaggtatcttctttataccttgaagattaagatattttgctactccgccaagtcctatatcagaattagcaaatttatcaaatataattctgattgcttcagcttccgtttcttctatcaagagctgattgtctttcagataatatccgtatggtgcaaatccaccattccacccaccttgtcgtgctttttctctccgtccattcattgtctgttcaatgatattttctctttctatttctgcaaccgcagacaaaacagagattaaaagttttccacttgtctgtgacgagtcaattccttcttcaatacaaataagatttattccataagattgtacaaactctaatgaatttagaatatccgctgcatttcttccgaaacgggaaagtttataaaccagaatatagtctatctccaatccgttttttatatcggaaagcattttcttaaatgcaggtcgtccttcaatagattttcctgatttacctgcatcctcatagataccgacaatttccatttcttctcggtcagcaaatcgttttaatccgtttttttgtccttcaaggctatatccgtctacctgcatttcggtacttactctcggatacaggacacatttctttccttctctgttcatcgtaccacctccataattttatagggaaatgtgatatgtaaggctgcgtagcttacgcagcacaatccaattcttgcaaaactgtctttccgtatttttcaactatctgcaccataacattgataaatgaattaaatacttcgctttcatctttcatctgttcattttgcaattctgaattttggatatagttttcatttcccataatgagtacctccgctataaaacaagcggctgtactcttaattatagaaatacagccgccattttaccaatgtgcaaatctatccctcatacctgctttacacatttgttttcatttttttcaagtgcaacactaatggcaagagccttgtcaactcttgccattatgttattgggcatcattcccatatactgttttaacctctgcttatcaatcgtccgtatctgctcaagcaggataacagagtccttgtcaagcccttcataattacttactggggtatgtgtgggcaactttgcttttgtgtgtactcggctcgtaattgctgcaatgattaccgtcgggctgtgcttgtttcctatatcattggaaatgataagtacaggtcttgtgccgccttgttccgagccgataacgggattaagctccgcataataaatgtcgccacgcttaataattcgttccattgtgtttgacctcccaatatgatttagacaggtgcttcctgcctatgtaggcagccaaacgcaaggaagtatttaaggtcggaagtatcttaacaatatctctgttcttatgaccgcctttcgcttggctgatatgatagaagcatttcaacttgtcctcgacaccccgaaatgctatgggaaatcgccaaatggtcagcagcgaactgacaccacgggagttccaccccaactgtcggtctgacagagccgccctcattgcctgcgacggttttttcacgctcggactgtgactggacgggagtatcattatcctctttgtgggttatggcgaaatcgggagctacccgatattttgagtcggtcaagataggctcaccacctttcaatcgctcgctgccgcttggcaggtcgtggcgtaccgctacacacgcttatgctcatcacaatcacaaagagaaagtatttggcgaatgggtattcgattgtcaaggagctatcccgttttcgccacacaaaggaaaacagggtaagaggttttttgtcctctcaccctgtagcccgtgggaatattcaattttcccctctactcaaaaaacttttttaatttttctttgagcctatccattcttctgtaaacagctttttcagtaatatccagatacaccgcaatttcacgggttgaatatccttgtaccttcatcaaagcaatctgcagtgtaagcctgtccaccttaatcaaaacttgatagaggtgctgattttcgatactgtccagaaaatcctcaaccgttttgacttcgggttgtgtagtatcttcagcaagctcgtcaagatatgtacctgtttcctgcactcgctgataataccgtctgtctgaattaaaaatcgtccaatcgtgaacacggagcttttctatatcgtcctcattaacgcccaagctccgtaactgcttctcctcggcttctttccagagccgccatttcttttcttctctggctttgttgtatgccataatgtgtacctccaatctgaatttttttgaaaaatttcagattgaggtgggctacgacagccagcgccaaaagcagtcttctcctgcgttctgataaaaagcgataaacaaaaagccgcaaaggtaccaagacctctacggcaatacgcataattatctctataatatagatatgtgatttctacttggaaagtagaaaagtgccacgagcaagcaaggctttttttaacaagttatcctcacttgtgcgtgacactatgtaaatagctgctgcttctgataagcagcgtggttggatttgcccaacacataaaaatccctccaaactcaaaacgggtttagagggaagataagtttttattagggcatgataaatccgcccaccaaaagcaccgttttttttattcggtgggcttatccatcctattctgtataaagaaagagccaatgaactgcaagttacctcgcaaattcatcggctctgcgtctgtgcgtctggctctttgatgatagttacttttaattgttgaacatttataagctgttcctgcctacacttaggacaaaaaagcggaaaattaagaagtaccgtattttctcttatttttatccgtgttttgtttccacaaacggggcaaagcacccatttttcattttgcataaaacatctcccttaatgtacttcattagttcctgcaatagccgcttgcttttctgcttcatttaattctctgtgaagatggatagccataaataccgtaataatagcagaaagcacatctgcaactggctgagcatacagaataccattcaatccccatatcataggcagaacgagaataactggcacaaagcaaattccctgcctgcaagctccgagaataaagccctcttttccttttcctaaagcaaggaataatgaggaatatacggtatagaagccaaacagcatgagagaaattccatttacccttaatgagcttgcccctactttaatcatctccagattgccacttgcgaattgtgacacgatggacgttgaaaataaagccagtatcaatccataaacaacacaaaacacggttgaccagataacagaagttttaatagcttcatgcaggcggttgaattttttcgccccatagctgtaccctgcgattggctgaaagcctttaataaaaccaaatattgttagacttcccattgaaacaaggcgtgtcacaactcccattcctgcgattgcagcatctccataatcagccgccgcattgttgatgagagaaatggaaaggcttgttaatatctggaacacaagcgttggaataccaatcttaaaaatttccgatgcaacctcttttgaaaggcagtaattctttattttaaaatcaaatacactcttctttccaaaaatataaaatagatacaccagagtagatactacctgtgaaattgcagtagcaatggcggctcctgccactcccaaatccagtacataaataaatatagggtctaatgcaatattcagtacggctcccatcagcagagcgcacatggtcgtctttgctgctccctcgcttgtcacgatattattcattgtgacattaaagacattgaagatgcaggaaataatataaatacttccatatgtgaccgcatagggcaaaatactctctgtcgctcccaaaatacttagtatcggctttagaaaaatgacagacaggataatcataactgccccgacaaaaacgctgctgtataaggctgtgctgacaacttggtttgccttttccttatcattgcgtcctaacaatctggaaatgtaggatgctgccccatttccaaatagcaaccctaaaccaaccacaacctgtcctaatgggtacacaactgaaattgctcccatctggctctctcccaatcctccaacaaaataggcatccaccagattgtataatgcgtttaccaacattccaatcattgtcgggatacccattgctaatagggcttgagggataggtgcgttacctaatagctgcattttcttgttttgttgactcataattaacactccttttcttgactttgagtataaaatatagtagtataaattacagcagttaaagctgtgttgtatatactactataaattatagtagttgtcaatagagaaaggagaatatcatggcaacaatagatttaatcgtattaggaatgctgaaaaaggaagccctaagtgcttacgacatccaaaaattggttgaataccgcaacatatcaaaatgggtaaaaatcagcactccgtcaatctataaaaaagttatccagttagaggaaaagggatacatttcaagcaacatagtcaaagagggaaaaatgccagaaaaggcaatctactccttaacagaagcgggtgaaaaacagcttgaaaatcttatgtttgaaatatccgcaaaacccattcaaatcttcttggattttaatgcagtcattgtcaacttggatgcccttttgccagaaaatcaaatgaaatgcctaacagatattgaagccaatataaaaacactaaaatcatatctggaaaaaaatttgaaagcgaaagaaaatgtacccgaaatcccacaaacaggattagcggtcttgcaacaacaattcattcttgcacaatccattgaaacatggattgatgaattaaaactaaaatacgaataattacaatcctccataagatacttttccaaataggcagagccgatgaactgtgagtttatctctcacaagttcatcggctctgcgtctgtgcgtctggctcttttatgacggttacttgtaaattttgtgcttcaatcaatgtctgctgcttacatttcgggcagtagagaggataatttttcaaaattgtatccgctcttattctgtcacgagttttattaccgcaaacaggacaaactatccaattagcggtcatttctttcctccctttgtcgggaacagaaaatttcgatagctttactgaaaaaagcagctaaatttccattcccaaaccgatttataaaatcagaaaatcttaaatcagaaacatacattttccccaaagaaaaaagtatttgtttatcgcattgataaaaatgttctgtaatataaagctgccactcccgtactacattttgaacttctggacaatctggcgacttattttcgtatatcgctaatttttcaaaaatattttgtgccatagagaaaaaagctgtcatttgctcattttgaacctcttgagcttttgaggaaaagattgcttcatactctttaaaactttcagtatctccccacttttccaaaacctctttttggaattgagattgcagttccattacttttgagttagaaaattctgaaaaggagattgttttccccccactgatttcagcctttacaagagatattagaccgtctatgcgttctctctgggcttccaaaatgcataaatgcttttctaatgcttctgtccgattataatgaggggaattgagcaaatttttaatctctttcaatgcaaaaccaacctcacgaaaaaacaaaacttcctgcaaccggcacaaatccgtatcagtatataagcgatactttgcttctgttacaatcgaaggtttcaaaagtccaatctcatcataatagtgaagcgtccttgctgttatacctgttaaatttactacctcgtgaaccgtcaatggtttctcattcattccaaaaatcctccactgcacttaatatttcatttgcagataacaaagttgcttctactatactttttcctgttttttgcaaataatattttactaaatgatagccacaagcatatcccgcacaatatggcaatccaacagggggataattttgtaaagcagccatttcatcgccatacaaataagcattaagattttcaagcccctgtacgtccagtccatcataaataattggcttgatatattcatttagcgttttcatatcagttttcttaacccacggtcccgccttatcttctccatacaaatatgtggcaaaattttctgccagcccctcactgaccatcatttctccgagcgtaatatcatttctccatttaataaactggaaacgcacattatgatttgtttcatgtgcaagcgcaactggaagatgctctaatgtgtaatcattaggaataagccaagaaaaaatatatcccggaatacctccatccccacaatagccctcattcattgaaatatagggactttctgcatttgccagcagaatagtaaacaaatattcttgaacaggtaactcaatccctgcgtctgaaaaacacttcaacgatttttcgactgattgtttacattcagaccaaagcctatctgaagatatacgttcaatattatctcgttgagtttcatccacttttgttggcgcaatatgaccaagcatcccactcgccattatcacatcatacccatttggtgtagctgctttcatcggcacactatagcaagcccattttttctcaaaaggcatcatcaattcataacgataaatgtcctctttcttatctaatggtgctttcataatcttggcataaataccatctgaacgaataaaatttacattcatattacttcatcctttcttttttctacatcatacactatgacgtaacgtaaaagtcaataggatgagtaaatatatttgagccgatgagctgtgagtttatctctcacaagttcatcggctctgcgtctgtgcgtctggctctttaataacagttacttgtaaattctttactttaattaaactctcatgtttgcacttcggacaaaataatggaaaatttatcaactcggtgtctttcctaatttttgttcttgttttgttgttacaaacaggacatattacccataattgtttttccattaaagaaactcacctacctcttatttcaatggaatacaaaattcacatagatgtaaagcaatttttttcgttgagtaccgttcaataattggcttttccttatctactgataagccaatggttaatttgggaatgttgttccaaaatgctattatatcgttttttctatggggaacttcaaatatagcatatttcccatcatcaattttacgggtatctaactctacaactttgtgttcgtcaataataagaccaatatcatatctttgcttttcggcgggtgtatatataggattatctaaagatattcctaaaatgattgcagcatcgttgagcaaaccattttcctttaggtatgctttaaaattctccatcaatttttgattctctgaaccatatgcgcctgttctacgcacataagctattttaatatttctaaattcttcaataatcaagttatgacctccaatctttattgttatcaagcttgacaaacaaatcgtaaatgcaattaaaatgattttcaagacattttttaaaatagcttagaacttttttaaaatgagtgcataaagttctcaatttcctctatgcagttaattctttaataccgatattcacctttacaccgaaaaaacaactacgaacaaccttaaatccataaaatattttggagccgataatcggctgtgcatctggtttacctttcatctctcgccatttctttaccactaacatttttattaagccatctttgcataacttctatctgtttccctgtatgaaaccaatgctctccatttcccattacttctaagccacagtgaaatttttgagaaaaatattccacctcatcacggtcaatcaaattgtcattctcaccatatagtattttagtaggagcttcccattttgtaatgggatgtgatgacgcatattcccaatactcccacgagagcgtttgaccaaatgtggttgatataataagctctttctttaattgttcctctgaaatatttgcccaactcatcatttttaatatgagccgcttcatatcgaggacaggcgaaacaaaaagacaatttctcaacctttcgttgccgaaacttaacatactgaaccatgccccaatgctgtttgcaaataaagaaattcgttcccaatgctcctttgcaaatttcataacctcggtcagttctggtacaatatgccacgggtcaaaagaatttacttcgcctttcctatttccgtgttctggtaaatcaatgcttagtatttgataaccatgtccacaaacaaactcggcaatattatacgcttcctccttatttcccccttgaccatgaatatataaatacacattacgagatggattccccaaaatgattgcagggatattattgattttgatttctttctctgtaatagtcatttccagatacctcaatatcttaattgctctacttgtccagatttaattgcttggatattctgagcaattttttcttctgaccaatcccaccattttaatctaagtagctctacgattgtttcatcatcaaatcgttttctaatagattttgcaggtacaccgcccacaatgctatatggcggcacatctttggtgacaacagcacgagtaccgataattgctccatctccaatcgtaacacctgccaaaataaccgcttcataaccaatccagacatcattgccgataataatatctcccttattattccatgcctcggtaacattctttttctcaagctcccattcctcaaaaaacaaaggaaacggataagtagatagagatgccatcgtatgatttgcgctattaaaaagaaattttgcaccgcaggcgatagaacaaaacttccctataatgagcctgtcatggttgataggatattgatataacacattattttgctcaaacttcttagggtcattgacaaaatcgttatacatcgtataatcgccaacctcgatatttggtcgggtaatcacattttttaaataaaccgtttgcgtatctcccgttcttggataaatactctttgaatttgccatattttatcttcctcctgccatctaaagctatatatcaaattgtacctgctcaagaaatattctcaatacaccaaacaatacagatgcaatcagtagaaaaagagagctgcctttcagacagccctccgtaatcatttttgatatattatttttcttatggcataaaccgaaagatagtattcgtcagcaagttcttcaatcgaagcaccattctggtatttgtcaataatggcttcattccgtttgttgagttcctttcggtagccagacaattcgccccatgatttatgctgttcgtctttagcagggatatagatatagcctgcttgaacgtattgttgcagttcctcgaccaacatatcagggagaatttcgcttgcatttatatatttcatgcgggcttcctccttgattgataaagtcaagtagcaaagccagcaatattcttttagcgacttataattactccatgcaaatgtcgctcattatactggctttgcatggagctgtgcatcgttgctccgttttttgttctggcacataatctcaccaccaatgtttctgttttctgcctgtgattatagcatgggaatatacacaaatcaagtgttcaagcagcaccgtccttttaaaatacgaatttcaatttctataaacaagaaagtatatctcctatatgtagagattacacatcgtttaactggaactcctatttctgtacaatataagcgtaaaaatcgcaagtacaggtggtgagaaaatgaacaaaaatatagatgataacgatattgacattgaactggattttgacttcacaccgataggcttggctattaagaaagcccgtgaagtaaagaagataaccagagaacagttggtcgaaaatcttggcatctcaaccagacatcttcaatctgtggaaaacgagggtcagtttccgagcttcaaactgtttatcaagctcattacaatgtttgacgtatctgttgaccaatacatattccccgacaaagaagcagagaaaagctccgcccgcaggcgacttgattcgctacttgacacattagatgataaggacttgtccattatagaagcgactgcatacagcctttataaagccaaagagcaggcagagaagtgacattctctgtctgtttcaatatgctttgacctgctttgctatatacagcacaacttcctctggggtcggcttttcgcctttatattttatcttcttccaatacgcctgtaccgcagggtcgtccgactgcatggcatcatcaatcgctttctggatttcacaccttacctcgtctacggatatgccctctttctttgctattttctcaaatgcccttatgacctttaacttatccatcatataaacctctctttcttttgtggtatctggaaagtacatcaatttttcagatatgttttatatatccttttcggatatttgcgttattttaacatatcctaatgggatatacaatactacaaagggcggtgatgacggatgaaagaaatagattataaggcgattggtgccagaattaaatattatcgaaatcagagaaatataacgcaggcacagctcgctgaaaaatcgagtgttgaaccgtctaatatctcccatattgaacggggagcaacaaaggtcagcctgccgactctgttcaaaattgcaaattctttagaggtttccttagatgatttggtgtacgacagcttgaaaaagacacagcatatttccaacaaagagcttaatcatattctttccgattgcaacgataaggaattaaaagccattattgaaatggtaaaatcaacaaaatccatactccgaaaatgatatgtatagaacagcccgtaatgagctgttctttttttagtaggcaggtacaccataaccataaatagaactgctgccgacagaatactgattctgtttacaggcgtcgccagaattaccctccacggtgtaaataacaccgttttcgcatttctccacaatgcctacatggtcggtttctccgtcgccttcccaatcaaagaaaataatatcgcctgcctgcggctcgtagtttctgtcttgccattgtccgttacccttaaaccaatttgagccgtccacgcagccagaaaatttagggataatcccgctttcaatataaccacattggtcggcacaccaagacacaaagcaggcacaccattccacacgcccctcaaagccgtaccaactccaataaggctgacctccctcattgccgagctgcgtcaaggcaacctctacaatggcttggttgccgccgcttgtaaatccccgtccatacggataatagcgtaacacatgggcggggtactgtgtgtcgccgtacttttcccaccctaaccgctgtgcctgcatggtggaaaattctaccgcattggcataggaataaccgccgtagttggtttttgcccatgagatatacccattgccaaagttatagccctgcaaggcgagcttgatacgctccatgtcaatcgggttttccacctcggcagagataagggcggctttcagctcctgtacgccgcactggatggaatactctgggtcttgtatcccgttcggctcatggggataccttgtgttaaagctgccctccgccgcctgcatggggtcaaacccacgcccgccgctttcctgcatcatcaccgccttgataagctccacatattcggggacaccgtactgcttggcatatttctgtatcagcggctcataggcttccacctccgcactgacaggggtataggcgttacttccgcttccgccgccaaacagggaaacggcacagccgagcaggacaacaatgagaataatcacaactgcaatccaaccacctgcaattaaagcggaaatcagagcttttgtacctgcaataatcgccttgaccgcagctatggtggctctgaccgtcgctttcgttgcttcggcggttgcctttgcggtgacttttgccgcctgtgccgccttttgggcagttttcgcagaagcctttgccgctacctgtgctgtttttactgagttttccgtcgttttgattgccgccttagaagttgcctgtgcggttttaattcccttttcggttgtcttgaccgttcccttagcagttgctttcaccgctttttctgtatttcgggctgtggtcttaatcattttttgcccctgctgtcgggtctttatcaactgcgattttgctgtctgggaaacatcgggggcagcggaacggcttgcagccccatgacggatctgcaagccgtgttgctctgacatattctgtgctgctttctgttctgctgctttgacagcccgactttgcttgaaatcggttattttatcttttgccttaccgatattatcctgcgttgtcttgactgccttttgcccctgcttattgaactggtggataccttcgtcctttacacggtctgccgcaaaagaaatcctgtccgtagcatattctgtggcagagctttcatcagcgtaatatccctgttccgccttgtcctttatccccacataggcagatttcatacgctcactggctatggtggctttatctatggtctttatcgtgcctttaaccgcatctctggttttaatatcagccatagaaaacctcctttcccagaggatttgcgttcaaatcagccgaccttttttgccactacaacgagtctgccgttctgtgcggagtattcgcaggtggaaagggtaatgagcctgtcgccgtattcagcggtcacacctgtatcatgcaaagcaagctccttgcacttcccgacataggaattaaattcttcctcattctccgcatcaacaaagtcgtagtatcggaagccctcagaactgtacgccacagtcttaaatacagcgacgatttcatactctgcctgctctgtgagggtatcaaactgaatagtcttgtgttcctcatagaagctcttggacttgtaatcctccaacgctccaaacatcttgccacccttgatgtgatgaccgtagataaccagattgtcactttcggcaatatcacaattctcctgcacataaggcgtacctaagtcgctgtactctttttcaaaattgtgcttcagataaaaattcggattgttcctgctctgcatcacaggataattgattgtcgtgccggcaatggaaatccaaccgaccatatcctcattctgtaaatacaattccagatacttggcaagcacatcttctccctcgctgacaggggcatcgtctggcacggtttcatccgttggagcctgctctaccatctcggcaatctcctcaaaggcttctgtctgctcgtccacctctgcatagtaatgataaatgcggaagccgcaaaaagccgccgtacctaacaggcacacggcggctacaacacagataatagatttataattcttcataggcttttcctttcttatcttgaaatttccgtctgttttctgggagcaggaagctccctgcaatattcggggtatctgaccttgataccctccataaagtagggagcaaactcacagcagaacaactcctctggcgtgaaataccgttcccgcccttcctctgcatacccgttccaaaggttaaaagcaagatggcagaccttgactgttccacttgtctgccagccgccgtgcataccctctggctcgatgcagtcctccttgaaattgaacatctggttgatgttcgccctcgtttccgaagcgatacccatcacatagaaaaacgccctgtgataacagtcgttcactctgcatttcatcatattttccaaaaagaaatcacgatgatccgtatcacggaatttaatatcagccataaaagacctcctttcttagacctcaccgaacttggtcgtcatcaacttgtaaagctcggtattgcgtgggaacttgtttacaaacggtacaagagagctgccaactttgagtaatccctgtcctgcaccgacattcgtgatatagctcatctgaaggtcggagatattaaggagcttggcaagctcaagtctgtccgtagatgcttggttaagcataatgataaattcgctgttagcaagcatcgtctttgccgtatggctctgcaaaaggtcgtccacattctgcgtaatacccgtacagtacgcaccgtatttacgcacacgcttccagagggtaaagaggaagtttgcagagtattcatgctgaaagagcagatagatttcatcaatgaaaataaaagtgtttctgcctttggctctgttctgcgtgatacggtttaagatgctgtcaagcaccacaagcataccgataggctgtaactgcttgcccaaatccagaatgtcatagcagataagacggctgtgggtatcaacattcgtgtgctttgcaaaggtgttgagcgacccgtccgtaaacagctcaatcgcaagggcgatttcctgtgcttctggctcattctgttttaacagctcctcacggaagtcctgcaaggtgggcggcgttcccatatagttgccctgctgataatagcggtacacgcttgccgtgcagcggtcaatgatggatttctgctttgctcccaagttcgtgccaccgatgagctgttcgcaaagggataaaataaactccgatttcaaaatgacagggtttgcaccgtcaccgtaatcggagttcatatccatagcattgatgtgattttcacttgtcgcagagatatgaatgacttctcccttcattgctttcacaagcggggaatactcacgctctgggtcaatgatgataatatcagcgttggggtcggtcagaatgatattcgtcatttcttcctttgcggtaaaggattttcctgcacccgacacaccgagaataaaggaattgccgttaaggagctgcctgcggttggcgataatcatatttttgctgataacattctgaccgtaatacacaccgttttcatggtagatttcctgcacacggaacgggataaacactgcaaggctctctgttgtgagggtacgcagggcatctatcttccgtacaccaaatggcagggctgtattcaatccgtccatctgctgatatttcagcaccgcaaactggcacaaatgctttcttgcggtagtcaagagagcttctgtatcattgtcgagctgctctttggaatctgccgtatgcaccatcgtcagcacggcaaacatcattctctggtcacggattgtcaaatcatccagaaattccttgctttcttttcgctgctgttccaaatcataggggataacggcagaaaaattgttgttctggttctgcttcctctgccaattcgtgatattggtttccacaccaagcagacggttttccacctcccgcacggcttcatctgtgggaacggggataatatcaacggacagcatcatattcctgttcagctcacaaagctccgcaaccatactgtccttgatatatgccgcatactctctgagaaaaatcacacgcccatatctgtcacccattctgaagcagtcgctctcaaattcaaaggtatcagggcagataaaatccttgaaatcgtgacctttccgcatcgtctgggtaatatcgaagtggaacgctgtttcttctcctgtacggtagaagtcgtggaagatacgcagcttgtcgcctgcgtccagttccacacacttcgaccccagacggttaaagtgggcgataaggtcagcacccacacgggcgaagtagtttcgggcttcctcgatattcttcttgcagacagatacggttacatacttatcctgtacgatggaattagcccctgtcgccttatccagaagcattttgttgtattccttgcggtacttatccagaccgtcatcagccattgggattaaaatagtctgttcaaaatcagctttgttcaagcgacggttgttgatagtgattttcgtggtcgcaccgctgtcaagggaattaagaagctccgagtattcaaggaacattgcttccttatcctcacggcttgccacggcatagtttatatcctcaaatttaaaggtctttgcgtacttgttcctgccgacaaggaatatgccgtcctcccagattgtcttaatcgggataacattctgtaccgacttcggcacaacaaacttttccctgtcctgcttgaacagatttttaagagttctcagcattgtttacctccttgctgcgtttcgcttttttctttttcgttttctttggtttcggtgtcctgcctttctgctttttccgtactgtcggcaaccctttttcatgggcttcaatggtcggcttcatcgtttcgtaatagagattatctggcaggaacatcagctttttcggcatcagaaattccgatttaatccacgcccagacaaactgctctgcggtcataccgttgtatttgataaatcccattgccgcaaaggggaacgcacctaagatacaaacccaactgagggtttccgtaccaaaccgtggacggagaagaaaatacaaacccaccgccacgccgcaggcaaggacagaaaaaatgaactgtctgagggacagtccaaaaaacatactctccgtataattacggatttccttatttatcttgacttccaatcatagcacctcccttacaagcccatcatttctcttacaacacggtctgccattttgaccgcaccgacaaggacgagcatattgaacacaagctccccgatatagctccataccattgtaaccgccgccgcatcgggattgaccacaggcggagaagaagcaaatagggaaaagataatgcaggcaagcacgataaccgcaccttcaaggcatacagcggcatagctcttaatgaagctcttgccgacactttggctcggctctccagcaaaagtggaaaggggtacgggtgctatggcagtatagatatacagcttgaaaaacctgccatataccgacataatcattatgaatgacagcaccgtaataaacagcccgcctatcagcgtgaccgcccatagcgggatactctcaaaaaatccgcagtcttcaacggctgtcacgatttcctgcggcaacaccgtctgctgtgccgagccaaatcctgcggcattcataatcgtggaaatcataccctgcacaatcttaaacagtgccatcatcagttctaatccgtaggtcactgcacctttggcaatggcaaagcggataaacagcttcaaagcctgctctggtcgcttgacttctgcaaaatttccgcaggtacgcatcacacccacaacaaagaacagcacgagcagggcaagtccaatagcctgcaccgcaccgtgaatatccacgatgacattccatatcgtgcctcccttaaagttctctggggattgggtaatgagctgccatatctcggctaatttcttattccaggtgtttagggcgttctctaaattctgtaccacccagttatcagacatttgaccacctccttgatgatattagataacgggagcgagttccgcactcggcggatctgctcccgttatctttttgtgtcagtctgttatcttagcctgtgataagagtcaagatttcttttgcgaaggtaatgacaacgccgcctgcaagggtcaaaaatccgttagctctctgggacgggtcatgggatttgagagaaagaccaatctgcacgataccaaagccgagcataatcataccaacagccctcaccagaccgaaaatgaaatcggacagattgttgactacctgaatggggtcattggcagcaaaggcggttacggaagtaccaagcacaaatgtcattgccataacagccatacagtaataacggaagcctttcttaacctttccagtcatcggcagtttcgtggttttcttgttctcgttcttcttaaaaagtttcatagggtaaatcctccttataaattgaatatttcttccaagtcctcatcggacagaagctcataggaagtgctgacagctttcacgctcacggcgttatctggaatatcactgtcaaacacaagggttgcgacagcctgcgtaggctctccgtggatatacggcggttgccctccgtcagccgtcagcttcacattcgggtgcttcaagatgtcatacttgaagtccataacggggcgttctccacgcacaaaaagaagtgcgtaacggttatcaagcatacgcacttcgtctggggtcatcagctcacgccccgaaatctgataatttgttgaatagttaccactccgcccagagcttttcccgtaggtgttggtatcaatggtttccttgcccaaaagctctgacacatatttgtgggtgctttgctcgttgccacccagatacagaaactcatcgcagttgccaacaatgctttcccattgcttttcaaaaagggctttgagctgtgccagattttgcaggataatggataccgatacccctctggaacgcataacggacaggattttatcaaagtcatcaggcaatgaaacattcgcaaattcgtccattatgaaatggcaatgcacaggcaggcttccgccgtacttgtggtctgccagataaaaaagctgttgaaagagctgggtataaaggatactgacaaggaagttaaagctcgtgtcgttgtctggtatcagagcgaacagagcgaccttcttttctcccagacttggcaggtcaagctcatcggtggcggtaagccctgcaaggctctccagattgaatttttcaagccttgcggcaagggttatctggatactctttaaggtctttgcactaccactgtggtaatccctgtaatactttagggcgatatgctctgggtttaccatttccagacggtcaaacagctcgtccagagggcttacatagctgtcatcgtcctctcggacttcgcctgcacggagcagctccataaccatcgggaaattctgctcgtctggcggtgcttcatatttcagatagaacaccagagccagaagcagcatactcgccgccgtatcccagaacgggtcttgcgactgtgagcctttcggcgtggtcgccttaaacaagtttgttaccaacctctgaacatcgttatcgttccgcagatagacaaagggattgtaacaatggctgcggtgcatattgataaggtcaagcacacgcacctcatagcctttgttttccaacagaccgccgatgtcacggacgatttcgccctttgggtcgagtattacaaaagatgtgttgcactgcatagcatttggcttgcagaaaaacctcgtttttcccgcaccagagccgccgcagactaaaatattcagattcctacggtgctttttcccgtccaacccgatacggacattctgggtcaagagcttattggctgacgggtctttatctcggtacttcttattcaaagcacctgcgttgccccatttcgcagagccgtgttcctcacgcctgcggtaattcctgagtgtagagaaataaacgccgatgcccatagcgtaggcaagtaaaaaaataaggacagtctttacgctgtcctcacataccattatttcaaacggattgcccatcgccacaggcagacctcggataatctctacaagaccgccgctgacatagggtgctgtcagcagggcaagccatacgacaggaagtatgccgcagacagaaaggattaggctcgttttctggtcatcgttcctcattgcacctgcaatgcacgaccttaaccttttttgtcggagcgtgtgccaccttgcttatcagctcgtcaacaggctcggtggggcgttcctcctgtaactgccttgtacgcagggtgtttaaggcgttgatgacgatattcttatcgtacttatcaagtgcgatatggtatcgtttctctctcatagtctgcacctccgattagcgttcctgctctttgttctttgcaggcttgttcttctccatactcttatacatatcgctctggatttcgcccagaacatcacgcatcgtgccaagctctcccttgaacgcctgtgtatccatttccgcatactctctgggaagtctggaaaagtcaaaacctctggtatccacgccataacgggagcttaccatataggcaacgcagaaggatttgaaatcggaagcatcacggctctcgttgtgcttaaagtcatagaccgccgccgacacttcttttgccatactcacgaacagcacttcctcggaaagccccttcttgacaaaaatggtctgctgagagctgtcataataggcaggcagttcaagctcaccgacaggaacacagggtacagggcttgcatcaatcagagccgacacaagctcacgcatggatttcggctcctgttcctgctgcctgtcctttgccgaggtttcggaaatatcataaaccactttggcattgtaagagacgccctttgtcccgtcctcacgggtgtattccttgctcggctcaaggataatgattttctgtgcgtccttgttcacatagacacggttcgctttccatttgctgtactctttaagctgcgttgcttcgggcatctgtgctgataccagaatagcgttagccacggagtaacggtcaaagcgaccctgcacatcaagatactgacggaagctgtcgccgcttgccaccatttcagagcaggtattgtcaatcagctcataggcttctttccgctgtgcctgctttgcggcagcccattcctctttatcaaaaggtctgttgccgccgctgaatacatcgtaaatactcatagctgtttacctcgtttctttggattttggtttctttttctttcttgggggctgtttatgctccgttttcctgttagcacttttcgccctgtcggaagcaccgcttttgtccaggtcggaagtgccaatctctgcttcctgctccttgcggctctccttgattttccgcagttcctctctgacagaaggtttctccttagtcatagtagccccctctgcggacttctttggctgctctaaggtaggctcggactgaggggatttttctgcctttgccaccgaggggtttggggcgttttcctccttctggacaggcttgcccataagctcgtcaagcagcttgtctttctccgccttttcctgcacaccaatatctggctctggctgaccgtcctttgcatctttggatttctcggcttccgtcacaatagaagcggtatccaccgaagcaagattaaagcgttccacgatacgactgattttcgatgcgtcctcggcacgggcgatgacatcgacctccgcattggggtctttgtttttcctgtccgtgaggacacagtaaagcacaccgtattttttcgcttcctgcgtgaacttctttaagtcgccgtttttgacggtaaagactttcagctccttaccagaacggagcatactcgtcagccttgctttgcctttggttttcttttcttctttgagaatggaatacaacaggatagcgatgttcttcgcacctgcacctgtaattttggcagcgacctcaaagccctccaagctcattcgggcgatttgttctgccgcttcgccgcctgtgttcattcttcatcagctcctttctttgctgttcgtgttcgtctgcccgtatcgtctgcaatttttccttgagggtatcactacgggcggaaatgccctcgcacagtctgacctcctttcggataattttcagccgccccgaaatatcggacagctctgccttgactgcttccttttcttcgccgcttgttctgcgggatttagagtaaagctcctttctcttctgaagcagggcagacatctccgttttcagagagcctttatatgaacaaagctgctccgccgtatcaatgtgattgcggcaaagcagccttgtttcctgtgtgatggcttccatcttcataaggtcgtcctttaagagataatgaagccgtgcataattttgttttctgccttttggcaggataccgagcttgtagcagtaatggagatacagtccacgcaagccaccaattttcttagcgttcttcaaagagcctttgacccgatagaccttaatctgtggctgtggctccgagaagctctggaatttgaccgcataggaattttctctgatacgctccataatcctgtcattggtgtattcctctccgagcttataaagccgcttgggtctttgccagcccttgccgataatcgtccaatacttgcggttggggtcaaagtttatgcggtagcccatttctgccaactggcggtcaaagtctttcagcgtgaatgatttgctgatagcttcgtccaccgcctgtcttgcaacattatccctcgtgggtcgcccctgcttttcggcttggtaaagggcgtagggctttttcttgccgcttgggtgttcgatgacggacagggcatactcacggcaaagctcatcggagtgctgacggagcagccgcagatttgctttgttgtcgtggtagtgcataccgtcagcaaaagaaacagagttcacgacaaagtgattatgcaggcagtcggtattcagatgggtggcaacgatgacttgaaatctgttgccccacattcgctcagcaagtttaacgccgacttcgtgagcctgctctggcgtaacctcaccgtgcttgaagctctgaaagccgtggtaacagacaatctcgctcgtgtcgttccaccccgctttggtaatcatcatttcatctctagcggtggtcgggtcacagtttacgcctgtgacaaagaaacgctgctcggtcttattcttattagtagcgtactccattacatcgaccatcgcctgcaggtcggcttcggtgtatttggggttggctgtcttttcgggattttcggcatagtcgattgggtggtcgagcctgccacgcacatcccatatctcgcagaccgccattacgatgacctgcgtggaagcagataccttttgcgaatttcaatctgaaattcgtgccacctccttgcttcctcacggagcatcggagtatccacaaagccgagggcgtttgccttaaccgcaagctgattgatacggttgccaatagcggacagctcacgcatcattttatagaactctgggtcgggcttttcgcagagctgatagccccttaccatttctcttaaaaaggcttcttttgagcgacccgatttccgcacaagctcattaaggtgttcggcttcctcctcagtcagacggaaaagtatctgcacatttctttttcgcattgtccacttcctttctctcggaaagtctgtttatctgcaagcagcacatacacgcaacgccgaacagaccgccgagcattgtgccgataatgaaaaataagaactcactcattcttgaactcctttctgttctcacggggtattaggggctgacccctaacaagcgaatttggctaaccaaattcagtgcttggtaagacatctcattcttcgcagtcctcctcatacatacactcaccgcacacggggcagaagtacggacaatccgaacaatcctcattttcctgtagtgtgttctcgcacgcactatcaagactgtcctctctctgctcggtaatatcggcttcgccgcagacaaaatcatcatcagtaaagttgataaggtctgtgtcgaacaggataatttttgttttttcttttgcctgttcggggctttctgcatagacggaaacggtcttttgataatgggcggtaagggttacatcatactttttcaatggttcattcctcgctttcagcattaaattttgatttggtttcggtatctttctgggaaaaaactgctacacaatcaacggacatcactcctttcacgcttagactttggtcttgtaatccccagataggacaacaaaaaatcgttgaagtccttgccgacaggcggtggatcatcaacgattttgtagtctttctgcaacagttctttcaaagtagcggtacaaagcctgcctaccttatcattatccagatgcagaactatggtcttaatttgtggattggcactcaaaaaagttgtgagggctatgggtattttgctgtccttcatctctttctttggctgatacacgcccgaaagagaaagcagactctccgatttgcagtccttgtcctcgcattttagataagtggcataggacagtaaatcaatggcggcttcaaataaatgcacggtatccgcaggcttctttgccagaagtcggaacgaataccgcttgtcgctgcccgatgcgtcctgcttgaaagtgctgccgagagtgcctcgcagggcggcatatttcggtgttccgctttcgtctttgccgataaaaacagcattgtgataatcggcactttcataaagcgtgccatctgagatacactcctgtatgagctgatagtcaataccacgcccgaaaagatactgtatcactctgttacaatccttattttttggcggcagaagcagaactttcggctcatctttcttgggagtagggggtggcttccagtccgccatagtctgtcccgtgagaatttccacggcttccacaaagtcatattccttaactttgataagataatcgagggcagaatagccgccgaaacctctcgaccaccaataccatttaccgttggaaatctttaagctgtcgtgttctgcggtacagtacacattgcttgtgcctttgaccttaacaagattgctcggctcaaactcccgcagataggataacaggtcaatctgtcgtatccgttcaagcacatctgggtcaatctgcacatagggttgcttagttctcaatggataaaatcacctccagaaatagaaaaaaccgaggggctttcgttaaatgaaaacctctcggctatgtataatttaatcctaatttggttgttgttgcatatcttttatttttaataatgcggcattcactttccccaaaatttgcttaacatctgtgttgatattacatctaaacaaacctttaaccactgacagaaactccatattaattcttaaatagtcatatccttggtcaataacactatttagtctttccaatacatattcccaaaattctttgcttaaaaattcattccttaattccaataaatcctttttgtcatctacctgtccataaattttttcgtaatatggatttaccagccaatatgcaacttgaataggtctgtatctttccagagtatcatagtccgctattgttttatctccaatcatatcattgaataatgccccaaaacattgatgctcctcagacgagcgtattacacgttcataatatttttgatacccatgaataaaacgatacatcttttcagtttcgctttttctggataacatatgcactaacattcccatatctaatatcaattcttttgcaaaaatttcgtcttgaatctgttcgtctggattccccttataccttccgtgggcaattttattgcgaatcatattgttaaaataatacataaaatattcaaccgcttctggatagatgtcgctcttaacttcttgcaaatgtctaatcttatcttttaaaacagcatttgaataaatatccattttggaaaaacgtaaaaatgttgttgtatcctgcaaataatctgcaaacattccttctatctgtattggcaagatgttattaaatacttcatattcaccttgcttatataattcgactgcttttagtaaaacgcgttttctttctcgaagacaaacactcgattccaacttatcttgtaattcctccaacagtctataatctaaaatcaacttctccaaagcggcattgtaattaacagaattactacttttatataactgtaaatcatcaattttagggatctgttgaatataatttttatattcatctattgcctcatcatccgatttcgtataacaagaataccgatattgctttcttgcattttctaagataacatatattttcactttgaaaaacagagcatacggtctatctaaatcatcttccgctatatctacataatcccgatatgatgaaaaagaaaaatccgcaccgtaagaatcttctttactcaatttcaaggtttcctgttttttcgcattttcaacgctctgcatatcttgcatatcacagaaatctgacaactttgaagttacatagtcaattacaaacgtcaacatttcttttcgtgttcttaaagaattacatttcgaactaagttcataaagtttttgttcttcagtagatatatctctcataaaagaataacttggcgtggcattttttattgcatcagcagaagtctttgtttgagtaagttctgtatctattttatttatctctgtttgaaatttttgcattaccacgccatatttctgaacaaatatttcatcatattctctttcaacatcagtccacacttcagacggtaattttttgaaatacaaaattttacacaatgcaacataataatcttcctgagttatacattccacattccttggttttatagttcttatcactgcatttaataaatgagtgtctgcattttcaacctcatttagtacatgattataatacagttctcccaattccttcatagatgtctttgtaaaaatttgattgtccatccaatcatctaatttttttgttatatattgaaaaatattatcacatattttttgcttttcatctgctgtcatatctgaacatctccctgtttttttattattatactatatttgcgagaagttttctacttgtgtgactatgtaaaaggcggcatcagctcaacgccaatgccgccttttacaaaatcaaaccgatataaattttcgccttatttagatattgggattacattaacagcgacaaagtatttacccttgataaaacaattactgactttcacttctcactcaaagctatttgcaactcggctaaacgtgtctgtattatttttttgaattatttcattcaatattttccaatcagatgacgaaagaatatccttaagtcttctacaaataattcgatataagttttcttcaaaagtcaaccacttctcatcataaataatctggtctcttgcagaatttagattcaagtcactatttacaccaatatccagtctgaaggaaaaaggaaatggtattttaaggactgctttcgacatcctattcgaataatcaggaaacaagttgtaaggaacttctattccatgtatagataatgaggctttggatttaaatctttccgaccatgatgtatttgtatcaatttcaccgtcttcatctactgaaatgcttgttgatgtttctgtaatacaattagttttatattttatatttgaagacagggtataaatctcaccatcaatttcaacatcttttgataatatttcaatttcctctgctggcaagccatttttagtaagtattcctatacaacctctccctttaaatccatactcttcacaagtcaaatcaatatctattttacggatattttttgtattattccaagaataatctaataaaggttctaaatctaaatcatcaaaataatcacttgaatataattcgcttcctttgtttgtttcaatctcaatttgtactgctggatttggcacaatgacttttatacactgcataaattcttcttcattcattctatcccacggatgcactggacgtaatgttaatatagtatccgttccaggttcttttttatcagaatccgaaataacaaaaagactttcataaccttcaatcgatatatgcaatgcttcatcgcactcgaatctttctctaattctcctagttgtcacttccatagagtcacataccataaaacatgaaagaatgcctataccaaatctagatatcggagtgaacgaagatttgaacgaaaccattaactcactaaattctcgagaagaataatatgagcatccgacattggtgtaataattatcaattatatgctggttcatgccaacaccattatcacttactcgcaaataatcaacattattttttgtatataatgacaccttaactttaggggtgtactctattccccataactcagagagtttttgtctaagcaaacaagcatcaatggaattttgtaacagttcacgcaatgcaacttctggcttaccatacagcttagttcccattaacaaatcaattatttgtttcttacttaatgaaaattttgtgtcatggtaacgataaatagactttcctgatattatatcttttttagcttgtatttttcttctatctacttgaggtggcaatggaattttatagacctccacatcaatatccattccctcatctgatagattagacaaaataacagtgccattcctcaattcttcatcaatttgatcgcaaaaagcaagaatagtcgcttcaattgcagggtgttcgcactgagccgaaaataaaagttttctgggcgatattgtccatgcatttatactttgatgctttttccattcactcaacgatacaggattttttacagctagatgagaaaacagaacagaaggtgttcttttagggtcaaaatcaattatatcggctaatcgtaatactgttgccacaaatggaatacacaggtattcatcttgaccacagactctaaaggtttccatttggagtaaatatgtgtaactttcattatggctaaaacaaatcgttgccaaatcctccgttaaatctgtatcttggtatactatttcccctgcccaatactttgcgataacttcccttgcacgaatcgaatgagttgttcttatatattcagtaacaatataatcttcaagaagctgcgctttcgaaaactcttgttctgtttcaagccgttcaatgtcagctaattgatgtgtatacgttagacgaaaacgagcaaacttttctctttcttcttttaattcctcgtcatattctgtctcgggaagttgatttttccatgctaatatatgcttttcatcaggagccatacctatatcatgtaggaatactgaaacaatcaacatgaataagtctggcgtagataattttctcatgttctcttgcggaataagttttccaataatagtgagcatattaaaaatatgagtatcatcatgcagggtgaactcaggcatatttttaatcactgtctttaggcgttcaactgcaaaagtaccaactttcgctacaagagccaatacttcatgttgattattcctttcacaattatcttttaattgctgataaactaccgacttatttaattgattttgcaaatattcattcatataatattcctttcgtgcatttaacggctaaaattcatagcagtatcacaacgtatttttcttatcataccatatagattaaattttttctatctctactactatgtaaaaagacggcatcagctccacgccaatgccgcccattctcggttatagtattcctgcctttttgagatacccaacgctgtcatagcaccctctgaaatagattgcttcctgctgcatatcgctgagcctgttccgaagctccaaaacttctatcaaagccttacactcctgctcggataaatcactcggcttttccgtatccaaaactgccatcactttgggatactccttgtaaagttcctcaattttttcctctacggagcggtattctggattttcttttggcagctttgcaataacggagcttagatattcagcaaagatgttgctatgcacatcaacaaaggtttcaaatctgaaattatcaagcacacctttcacctccgacatttactaatctacacctattatacttcccagaaatcagcaatacaaatatgcaaaccgcattatctctcccgacttgcacattttctttcgggctgttcttctgtctgctctggctcggtatccataacggaagtatctttttcattcagattcagctcaatgttaagagtgttcagccgttctgttttttctttcagctcatcttcaaaggcaaaaggcttcttgatttcctcctttgcgatttcaagctgtgcgatagtttccgcctttttggtcttggcagcttccagtctggcgaggagctttgacagctcgttctcaattcgggtcagatttccgagagcatcagagcctaaatccaccttatgctttgcctttccgcagaggttcatacagtaatgggcgttgacggtatcataataaatctccattcggaaacctcgatagctgccgatttcggtaggtgcagacatcggataatccttgcagattgcaagaagcatttcgcctgcgtctgccttttcggtgtaggtcacgccttttagggtcatcgggcagaacttatcctcgccctgcggcttgtgctgctcggcaagagctacatcattttcatagcctgcaatgcgttcctcatactccttaatggtctggggatagtatttcagcaccctgtcctcaaggtcgtaatgttcggaaagataactctgctttaacactcggagcttggaaacctgtatatccaaatccatcttttccttaaaacgggcatcgcctgtggcaagcattttaacctccgcaaaggacagggcaacctcgtccacatcttcggcagagcgtacagggcttttgctcgtcattatctggctgataaatttctgcttgctctccaccaactgatagaggtaggcatcaaaagtttgctcggtcacatagcggtaaacctccacctctgggaacatatttccctgccgttcaatacgcccctgcctttgttcaaggtcggaaggacgccacggacagtcaaggttatggattgctatgagcctgtcctgcacattcgtacctgctcccatcttaggagtagagccgaacagcacacggacttcgccgcttctgaccttgccgaacaactcttttttctgtgcatcggtgttcgcttcgtggataaatcgtatctgctccgcagggataccacgggctatcagtttctccctcatatcgtcgtagacattgaaagtgccgtcatttttcggggttgacaggtcgcagaacacaagctgtgtcgctttggtatcggcgtgttcctcccagatgcggtacacattatccacgcaggcattgactttactgtctgggtcatctggcagcatcgggtcaattatcctctggtcaagagccagtttccgcccgtcattggttatcttgagcatattgtcgatgttcggctcgacaagccttgccctgactttctcagcccgcttcgcaagggaagctaccatctcggtctgtatctcgctcggcttggtcttaatattgtggtaattgaccgttggcacagggagctttagcatatcggcggtctgtatatccgccacctcacggaacatctgcatcagctctggcaggttatagaacttggcaaacctcgtcttagctcggtaattcgtgccttcgggtgctaattccagagctgtaaccgtttctccaaaggtagaagcccaactatcaaaatgctgcaaaccgttctgtgcaagggtatcatactgcaagtacctctgaacggagtacagctcaaccattgaattgctaacaggcgtacccgttgcgaaaaccgtgccacggttgcccgtgatttcatccagatagcggcatttcataaagaggtcgcttgatttctgagcttcggtctgggcgataccgcctacatttcgcatcttggtgtagaggtacaaattcttataaaaatggctctcatcaatgaaaagcctgtcaacgccgagctgttcaaagtcgatgaccgtatccttacgcttggtgtcgttaagcttttcgagcttcgtcttgattgcctttcgggttttcattagctgtttgaccgtgaactgctcgcctttggaagcctgcacatcgtcaatgccacgctcaatatcatcaagttgcttttccaactgctccctctggcgttctatgctcatcgggattttttcaaactgcgaatgcccgataatgactgcgtcatagtcgcctgtggcaatcctgccgcagaactttttgcggtttcctgtttcaaaatcctgctttgttgtaacaaggatatttgcactcggatagagccgcagatactcggaagcccactgaccgacaagatgattcggcacaacaaacatagatttctggcataaaccgagccgtttgctttcctgtgcggcggctaccatttcaaaggtttttcctgctccaaccttatgggcaagaagcgtattgccgccataaaggatatgggcgatagcgttgacttgatggggtcttagtgtgatttctggactgatacctccaaaagtgatatggcttccgtcatactcacggggtcgcacagagttaaaagtgtcgttgtaataacggacaaggcggtttcgccgttctgggtctttccataaccaatcctgaaacgcctgcttgatgacttcctgcttcgcctgtgccgccgtggtttcctttgcattgaacaccgcttttttattgccgtgttcgtcatacacataatcaaagatacgggtgtcacgcaggtttaaggtgtcctcaataatacgataggcggaagcccttttcgtaccataggtgctgtctgcctttatattccccatatcggagcttttattctctatgaaccagtcaccgtttatcggggtgtatcgtacctttaatcttcctgcggcataacttgacggagttaaaagctccatcacaaaccgctgtatatcttcctgcggtatccaagtcgcacccagacggacagagatttccgccgccgataggtctttgggaatgaccttcttcaaggcttccacattaactgcaagctctgggtcattcttggcagcaagctccgcaaccgtcagcttgtttcggacatttcccgacagatactcgtctgaggctacataggaaacaggctcacagttcggtactttgaagataacaccttgtaaatcctgcacaagctcagcctgcgttttgcctgtgagctgctccatataaggcaaatcaacacgggctttctctccgatagagagggcgagggcttcgcttgcggtttcaacagaggtaatctcacggtggggcttgatagtccgcttcgtgaacatatctgccttccgtttgaagttgccctcatcatcaagcacctccagagaacataaaaggaagtagctctcgtctgaagcaaaagcaagatagtttcctcggctgttgattagaccgtattttgcggtataaacatcatacagacggttgaggttttcctgctcggtgcgtatcatttcctctgggtaatcctcggtctgatactcaatgagcttacgcacacagtcacggatttggataagccctttgatacggttttctgcggtcatcgacacagaagcaggttgcatacggtcattctctcggaagtaaaccctgccgtccaccagagtaaaagagaagttacgcacattcgggtcagcaggaacggaaagctcctgctcatcagagatttcatcaaccccattatcaagctctgggatttcgccgtttatcctctgaactgcattggacagaaactcggaaagtggtatatccttacaggctttacaaacaggctcaaaagtaccaaagcgtgtgctttccatctttatttcgcccaacaccatttcggggtgttcgacaaaatatctgttcatcgtaacaccgttttcgtccgtatcaaggtgtacccagtctggctctatatccatcactcgctcacgcttttgcaggataagaatatcgctcgtgacctccgtgcctgcgtttgccttaaaggtgttgtcaggcagacggatagcacctaaaagctcggctctctgggcgatatacttgcgtacctctggacctgctttatccatcgtaccctttgaggtaatgaacatcacaacgccgccggcacggactttatccagagcctttgcaaaaaagtagtcgtgtatgagaaatttctgggcgttgtatcggctgtcattgacccttatctccccaaacggcacattgccgaggactacatcaaaatggtcgtctgggagattcgttttctcaaaaccctcaatggcaatgttcgctttttggtagagctgctttgcaatcctgcctgtgagagagtcgatttccacaccgtgaagcttgctgttttgcatactttcgggaagcagaccaaagaaattgcctgtaccgcaggacggctccaagatattgccctgtgaaaagcccaggcggtcaagtgcgccatacatcgccctgataacaacaggcggcgtataaaaagcggtcagcgttgactccatagcggcacggtattcctctggggaaaggctggcatatagctccttaaactcccccgcccacgccgcattgtgttcatcaaatgccatagaaagaccgccccaaccaacataccgagataggacttcctgttcttcaggtgtggcaaggcggttttcgatttcaagctcgtgcagcaggttgattgccaccatattgttacggaacttttcttttgctccgccgataccgatggcatcatcggtaatacggaaattatgacggtctgtggcaggagcttccgttttttcttcgggtggtaattcggttttttcctgttccaatagcttttggatatattcgattttctccactcggtttatcggaaaacccacattgttctggaatgtgatgtcacgcagggacacatcgccgctgattttcccgatgctctcaataagatatttacggttgtctatgatgatttccctgcctatgaggtcgtctgtggattgctccgtttcaatggcaggagcttctgagccattcagtttatcggcatacacctgtggtttttcttcggcttcctcggctgtcctgtaccaatcactttcggtagccataatctcatcaaggaacttctcgtcctcttgggtcagctcggtgtgctgttccaaaaatgggataaactcatctctgccacggagcaggctttctcggtcatctccatatagctgttcgccctttggcgataaggcataatcgtaaaaattcttaatgtgggcaattaaatcgccctcaccatcgccaatatcaaaccgcccttcatagttaaatttctcgccgccgataacagccttgataacaaaatctgtcttgtgataccacccgatatttttatcgccctcacgctcacggtgctgtttctcgtccaaaataccaagcagcttattacccagagcaaagctcaaatccgtatagcggtcattaagctgtctgtcataaaaggcagggtgttcggaaaaaccgatagaaaactgtattccgtcctgcttttcctcggacggtgcttctgtcctctgtttctcggttacgaccaccttcagatggtcgtttgcaggattttccgttagcttttcttcaaagtcagctcggctgtattcctgccccaagatagggaactcggcattttgcaggtagaccttttcctcagtaagtgttgcaatctcatatttatccgcaccgatatacaccacatcgccctcattgtagaggtagcaaaatgggggcagctcccttaattcctcggtaaacttccacccattactgcggctgaaaactgaggtcgttttccattgtacctgtgcaagaaagtctatgagctgttgaacggttgaggggtcggacagatgctgttccatttgctcggcggtaacatctgcaaggtcgcttcgttccacaacagataacaggtctttttcgtacctgtccaagtcacggataaagtcagatagccgcaaagcaagggtatcccgtttgtcggcaggcggcaggtcacggtgggcgtcaataaaacgctgccttgctattttcctctgggtgtcaatctcatattggggagctgacatgctctccagataatcggcataatggtctttttctttcggattgagatagcggttatccttaatcatctcacgcagacgcttttcaacctgtgaccatttcaacacaaggtcgtgattggtataagtgccgtttcggtcaatggcaagacctttgctgtcatgccaagaatgaccgctgaaaccatcggggaagatgtgcgtaccgccgcccgttccatactcatttttaaggaactcaatatttttctgtctgtcctcgcccttttggaattggcggtagatacggtattttccgtccgcaacgccactgcctttctgaagcacggagtcaatatcttctttggaaatagtaaaagcagaggcattttcgtcctctgcttcggctatcatttcgatttgttcatctacggttggaagattgaccctaacctcatcctctttggcaacgcttacttgtaaatcagttcggtcagtatcacttcctccgcttgactgcggatgttgttcatcattccgacccactgcatcggtgctttctctttcagttcctctgtcacgccctgctcggctgagagctgcttcgtcagaagctccaacctctggagtgctgtctgctctacctcgtgcagatgcccgttcagcctgcccgatgtcagcagattgagataggtcactcgcttgtgcttctccagataatccctgtgcatcaaagcgtacctgccaagcggaagctctggctctgtcggtaatgttaggtcgggaataagataatccccctgtctgctgtaagtgatttcgctcattgtattcgctcctttcgggttgttgtctgtctttatcatactgagcctgcgttctttgtgcaaaggtgcgattctggtctttttccgccatttgcacatttcggatagactgtgagatttcccgtaacgccatttccgcaatatcgctcgtggcaatgccgatggcgtttatcgttgcaggggtattgaaatttacaatatccgcaacatcatcacggtcaaaaaactcattcgtatccagaccgcagcggctgatcagcataaaagcaacgctgtttgctgccagccgcctgtaaatgacttctatattaaagtcatccagttcttccaaaaagctgtctttcgtgcagtcctttaactgagaaaaatagtcttgcagattgtcctccacggcgttctttgccgtttccattaaggctgaagcaaggtcagtgctttccacatctccaaacctgtccgagagcctttccataacagcctgctcgtatcgctcatccatctgccatatcggaacaaggcggctgccataatagccctcgtgggtgtcggacacatcaaaatagtatttcagcgtattcctgcgacctttcgggtcaaatacggcaatacccttgctgtccttattgacccaacgcttaaactgcctgttccaagtttcgagcttcgcaacggcgacagcatcggggcgttgggcgtatattaaaagctgttcgtcaaaacggcatttatagttgcggcaggcagaggacagaaagccctgccacgcctgcggattttttgcaaccgcaacgcctgtacgccgatacagctctgtaattagctgatactttgcagccattcaacctacacctccttatcgtttttgtttcaaatattcctgtttgctccctccgcacaaccgccaagaaaagaaatgaccttgttcgatttaatgctcttttgcagatcattgatgagggtaatatccccaaccgtgatgccctgcatagaaagaacatcgtccatagtcatagcggcaatcgctttttcatcggtgaatcctgcttccaagaccttattcaagaccttgatggctttctgattaacagccatattctaaatcctccttatcgttctaaatccttgtgcttcggtgttttctgcggcgtttgttccgcagatttcggcttataggtcgccccatttttctgcatacgctcggcaaactcgcagatgtggtacagattgctgccgacttcggtatggtattcatcaatgaagcggcagggatactcccgtttctctccccaagaggtcgtaacaatgacctttccgccgtctgggatacggaacatttctttgtattgagggtcaataaaacggataccttgttccgctttctggatatgcttatcaagccattccttcacataacaatagcaataaaaattatagtcgcctttggtgggattgcatcgaagcagaaaagcgtgtttctccgtatctacacggaaaccgtactcagtacaatagttgccctttatcgcactttcgggaaaatgccttgcaaacgcactcatatcatagcgattatgcaaaagccctttatcctcccgtaaagcattgatgaccgtatcaaggtctgccttaaattcgtcagatttccattggggtctggtatcaaaccaagtggtgtaaaagccatagcccgttgtggcaaagtctccacgcagatgcccgatagtgcctgtctgcccctcaagctgcatactttgggcataggtgtatttctgttctgtcggggttaaaggtcttgtctttatttcattactcattcggctgctcctttctttcctttttctccttttgctcgtctaaaatcttgcggatacagacatcgcagaaaataactgacctgtccttatatcggggataaggacaggtcgtgcagtcatattttattttatcgctcacggtcatcaccgtttttctccttctgggcaggctgattatagggcatacggcactctgactggtatcgttcattcagcttttgccgtgcagcatcaagctcattcgtgtaataaccccagaaataatttgagccgcccttgcagtaccaacacacataaggattgggtgcgttgggattgtgaccgatgacaagctctgtactcccgatagtacagctctcgatgatttcatagttctgattggagcgtttttcttcgtccataagcacctctctattctttggcataacgccgataggctttttcgcccgtggctctcattttttgcacagggtgactccctgcaagctctggatgctgtgcctgcagcttgcggcgtgtcctgctgacactctcaaagctcggcagaccgagatatttgtgctgcgtcattatctctgcaagcggcattgcccctgcatccttcagacaggcattacaaagtacaagatacagcaccatatcgtcatttctggcatcttcattcttttccagaacagctctgactttcttttcaatggtttttaggtttctcatctttacctccataaaggaaagggcggcatctttcagccgcccaaaccacttacttattctttctgttacggatattcagccataccgccgcacccacaatgaacacgacaagcacgattgcgataatggttttagcgtccatcaattagtcctcctttttcttctttctgttcttatagccgacaaatccgagaacgcccgcaccaacaacagacaacgctgcaaggcttacccataagcccagattgaagtcatcgcctgttttcggggtatccctgaactcattgtgcatctgcacgatagccgtagcgtccaccttgaccgttgcctgtttatcggcaggcaggatatatcctgcggaagccttgtcgcttacttcggatacggtatagtcgccaatccgcaagccctcaatcacgatttctccgttcttatctgtcttaaaggtctggtcatagtccacgcctgtcacacggaaagagaagccctccaccttaccgtcagaggaagtctttacgattttaagagagcctttctgtgctgcattgataaatcctacacccgccttattttccacggtgtaggtcttgccgttctcctcaacggatacggaatacacattttcatcaagcacaaagcctgtcggagctttggtttcctttaccagatatttgccgtagcggagttcactcatctggtaaacgccgccgtcaagttctttcatttcgccaagcagcgtatcgtctttatccagtttcccatcgccattagtatcggagtaaacctcaaataccgcaccagacagcttgttgtcgggataatcctcatcaacctttgtcaaagcgatattgcccttaatgaagtagttgacaagttcgatttccacaacttcgtccaccttgccgattgtcacggcgatttcttcctcggagagtacatatcccttcgggctttcgatttcacggattatccaagttccatacggcactttggcaaaagaaaaactaccatcatcttttgatgtggtagctgcaatcgcattttcctttgtaaactcggtagttcctgtcgtaaagataccgataactgcacctcccagagcctttccgtcctcatcagatttcttaccgcttacagagccgtaaataatgtcatttgtgatagcttcgccctcattggctgtgatgcggacagtttcggtatcctgtcctgcgtattcaaaaataacagggtattttgcatcactgacaatatatgcggaattggtcgagatttcctgcacataatagctgcccatcggcaggtcgctgattgctttcccgtgaccgctttcatcaagggaaatgacctcaatcagaccgtccacaggaatggtctttccgtctgcggctgtgagttcctctgccgcatacaatccaaaggtcacatcaaaaatttccccgttcttgccaatgccgtaggcatcatcaatggcaaggctcttgatgaggtcgatttcaacacgctgtctttcattatagaaagaagtagccgtttccgttacatcaacattctgtcctgcatacacaagctcaacagaatggacttcctcattcagcaccattccatacggagctgtgatttccttaacctcatattttccgagatacagttctttggattttgctgtaccgtcctttcctgtcgtaacggtatccacaacctctcccttgtttgctctgaccgttccgtccagagtgacaatatcctcggctgcggtaatctcatagactgcaccctcaagaccgctgacagagaaaatcggctgatacaaccccttatcgcctgccacggagctgaatacctcgccagacttttctacagtaattgtgcctttctgtgccatattggaacgtactacctcaataacggtaatgccgctttcttcctcagagttttcctgcaccacatcaaaataaacaggctcggaatttaagacatacccatacggggcttgtacttccacaagggaatagcctttgccgtattccaatgtctgcggtgtgataaggtcgccgtctgccgtagtatagaaggtgtcaatggtcgtcacttcgggataagtgaaagtcatagtcacaagatttccattcgggtcgtaaatctggaagcctgcacctgcatacgggattgtattgcctgtttctgcatctttctttacaattttgatatagctctcaaagttagcgttgttgataaggtagcggtaggtctgaccgtccttgctgataaacacatcaaagtctttcatcagttcacgcccctcccaaccagaggtctggcggacggtataaatgccatacggcatatcctttgtctgggcaaaaccgttctcgtcacatgtcagcacatcacgctcggtttcctttgcattttcatagctgcctgcggatttgaggaacacttcaaataccgcaccttcttcgggtgtttcaatctgggtttccccgttatccgtatgcttgatgagtgcgatattgcctttgatgacctgttcattcacatcgtttgcggtactgttcagctctaccgtgtatagctctggttctgcacctaccttgtgtattgcggtatccagaagatacccctcggacgggctgatttcacggacagtccaatcattatcacagatataatacttggtcgtaaactgaccgttttcatcagtcgtgtaggtgtcaatcagttcctcacctttatagatgccgtaaaccgcacctgcaagggaagcattgccctgcggagaacctgtttctgcatcggtctttgtcacagtcacttggaatttcttcaatacattatcgaagctgcgttttgtgaccttgttccattcaatcggagctgtctgggaagcaggaacaacatagcggactgcggtatccacttcctcaaccacatacggggtatcgccgctgataaggacattttcaaactttgccagaccgtttttatcagtcacggcatactcgtcaacaggcaagccgcttaaagatgtgccgtaaaggtggaatttcattccctccaccagattgtcctcggaagtcttgacgatttccagactgccacgcttcaaagtattgctgaaggtcacagtagaggtttttcctccaataagggtcacggtctgggttttctgcggctcataacggtcaatggactgttctgtgacggtataagtgccagggaataatccctccacggagacagagccgtcctttcctgtcttaactgtcttatcgaagttatcacctttgattgtaaaagagatgccctccacaactccgtcctccgaagtctttttgagggcaatcgtgcctgtcggcgtttcgatattgatatatgcagacacggtatcagcattctccacacctgttaccaagtcctgcaagttcgggtcgccataggcaatgagctttgcactgctgctgaccgtcggcacattgttcctctttgccgtaatgcggacagaaccgctgatagctacggtggagctgattgtcagcttatttccagacttcgatacactcacattgctgtcagagcttgaaaagctgtaatcagaaaggatgccgttgctgtctgtcaatgtgatgctatactttccgtccttgtaggcaagctcctttgtgatgtcattcttaccgcccgacataaagctcggaatggtgttatgctcacgcagcattgcaacaatctggtcatacactgcccttgctccgctgttggcataatttgaaccgaagtgcaggctgtaaacggtagtgcttgtctggttatatgagcctgtggcttcacggcagcctgtgacaaactcccaaacgagtgtctgcgtggcaagccatttttcatcatcacttcctgacagattatttcggttgccctgatacccatagagcagggcaagcccaaccgcctttttctggttggctgaaagggcgttccaagtatcagaggaagccttttttaaggtgtttcctgttttcagcggtactcccggctgaatacaaaacgcattctcgccatccacaaacatacggtacttgtaatttcctgttccgcctgcggtatagccgccgatattcgcactggaattgtacctcatcgtattaccgttgctgtcataggtgtgggaaaaggaaatcgtcccgatgtcacccgcagcaaacgccgtcgcaggcattatggataatgccgtgaccgcagccattacaaaagccgcagcctttttgaacaatttagggattttcatagttacctcctgtaatttggattgaatattttgccttactgaccgaaaaaagctgcccgttatggacagcctaaagtatttcttttctcggatagttactggcagtagttagggggtgaggtgtggagagggggaagccaaaataatggctatccactcaaaaaggcagacctcgccctcggtgtgtggctatctctcgtgagccttgttccgctgcaagtgtcggttataaaactccaacgctttgacaacaaaatccgtttcctgccctctaggaacagtcttgggaatgagcttggttatcctctcgtcacggaaagcaggtttttccttctggttgggcttttcttcctccataatggactggataacctcggaagtgagtttaccgtcttggttatacttcttcattttgatagcctgtgccaatgacggggtagcatcgttgtactccattgcttcaagcagggtgtattgctgttcctcggtcagataggaaatttcaaccgcaggacgaaaagcaatctgcctttcatctaccatttgcaggatttcgggtacaagctccgttagacggatatagcggaagatttgatttttgctttcaccgactttttcggcaagttcatcacttgaagtagcgaactcagaattattacccactggggaataattttcttttgcgggtctgcctgcctgtcgtttcatagcttccaaccgcattttatacgcaaaggctttttcacttggtagaataacggagcgttggagattactttccaccatcacaataatggcttcgtcacgggtaagctctttaacctcgcatttcagcgtttcaatccccgcaagttcacaagccttttttcgcctgtgaccgctgataagctcataccgtccgtcctcttttaagcgaactgtcgcaggggtcattacaccgtttcgcttgatactctcgacaagctgttccatatcctcgtccattaaaaccttgaacgggtggtctggaaactcgtcaatctccgatatgggaatatcccttatcttagagagctttgcttcctcacggctttcgtccgtttggaaaaggtcatcgtatgcggtcagctcgattttggtttctctgcttctcgccaatctctgccacctcctttcctaactgctcataggctacggcaaccttgccgcttttgtcgtaagcaaaaatacttttgccttctgcggtagcttccaccgcacggatagaatgtggtatctcggtatcaaacaccttgattttctgaccatatgcacttttgaccgttgccgtaatttccttagaaatgttggtacggggcattaccatagtcattaagataccgtctatccgcagcttggggttgatttgccgcttgaccattgatacggagcgaagcaaaagctccagacctttagccgagagatagtggggctgtgtagggataatcacgctgtcagccgctgccagagcattgatggttatcatccctaaactcggcatacaatcaataagcacataatcgtaattctttttaacctcattgacataggttttcagcacacactcacggctcattgcattgattagccttacctcaaagcccgacagctcaatgtttgacggaagcaggtcaatgccctctctgtggtggataataccctgtgaaacatcaagcgttttatcgtctatgatgttctgcatcacagtagagagcgttatgggaatatcgtctggtctgttataacccagaaccatcgtgagatttgcctgtgcatcagcgtcaatcagcaggacttttttaccctgttgcaccagacttacgcccagattgactgctgtggttgtttttccgacaccgcctttctggttagtcagagcaatcactttgcaatttgacatagatgcgtcctcctttcacatagatttagccactttgtcaaggtggctatgtaaacagtaccagagaacgcaaaaaagccgcctactcttaaaatcaataagaataagcggctttgtaatttgccttagacatattcaattttcattctcttggtcggtgtatttatgaccttaaaaataagctcgtcaacacaatccgtatatctgccttgctgaatgagctgattttttaactctacaaggctatgtatcaaaagttttctttcgtgactatccaaatatatatgatatttctgttctctcataaatagcaccccctctttggcttcattgtataatagtaaaaaaggactgtcaaaactataacttcacatttcttggatttacgatacaataaatcacattatacacatctactaggtaatataattaccaatccataaaaatgtgatgatgcgttcaaagaggataattacttaatcattttcattgcaaatcacaatcagatgacattagcaaattttctaatttattctgagcaaatctctgaagataaaaatacttatcaataattttataattcatatttctatcaatttgttcaaaacaaaagtctattaactcttttataaaactttcaccagacagatagtaatcctgcaagattatattattctctggaaagtgcagataattataaatatatttttcatcaatatcctgttcaatgattccctcacctgttcctggcattttaggaaccagtcctgcccccaaaatagatatatattcagggttttttgcaactattttatattttactgatgatatattttctaaaactgcttcagcaatataatcatctataacaatacgaggatgaattgctatttctgactccatcttatacgctttattcaccgcatctccaaaaaacatactttttgaagggtcaacataagcatcaccataagatattccacctctaaaaagaattctttctttaatgaatcgtaaaaatattggctcacaattacacaatgccactttaaatagttcgccctcatctttacgttcatcagatattccgtctttaaagccatagaaaatataagcacaatcagaaaatgtatatatttttctaaaatacaccgtgtgcatcatatcattttgcttgtttctttcaagctcttcatgaaaaattttgttaattttatatgtctcttgaaaatcaactctattttggcttccaagaatatctacaaatatgactaaatatttagcgaaaccatttggctcattactcatcaaaatccacctctactattgtcctttttcatttaacttctttattacgcaaagctgtatctgttataaacctcgtccatccaaatactgaatagctgttgaaatcaaggataagcatcgcttataaaaatactcataatgccttttatcctgaatatccgtttttgttgtttcatggtgtcgaattctaaaattattgccaagtatggtaagctcatgaaattccttttcaaataattctaaaaacggctgttgattattacccatatccattatgatcttattaactgatttcttcttatctacagtcgatgagcagtaatatgtctttagtctctcaaatgcatcccaaagtttctccactgcaatttgcaaattgttttcatcataatattttgaagcctcttgtaataactctttcagtcctacttcttgaacagccactaatgaatttttatttatctgggtatcaaatgtattcattagcttccccttggaaagctgaaacggtatctcattcagttttaatatagcattaatctgtggttcaaagtcatctgagatactatgtttcgcaaaaaactctattgcgtccaacacgcaaaatggagaattagaaagtatgaatgcttgcaaatcagcagtttcaacatattcttttttatcattataacactttggcacataaaattgccttatttcattgaaaacatcctcagctactgttgtattataattccatcccgtttcgtcagtcgcttgatatacgatattatatcgctccagaaactgataaatttgatttctcgctttccgctttatggacaatactatcttttttgcttttatgtcctttgcatttcgttgagaatatggaataaacaacgtattatcttcttgctgatatattctccatccataaacatcacgattggatattttctcagcagggtaaatctcataaccgtcattttgtaatagcttgttaattgccactaaaaattctttccagtatcccttatcatatcgaacagcagggtgaaatacttcacaaagaaattttaaatatacttcatcgctaccatcttgtaaattgaatcttttgtcttcaaaaacccagcagtatggataatcatcattattcactgtatgttgccaaatatcctgttctgcatttacaaatcttgaatcaaaacttggcattctctctaaatcatataatcttttaagaaaatctatttcttcaaggcgaccataataattgtaagtaacggttcgggtttgaaaaaattcgtctatctccaatccattctgaaataaatctaaaatatctcgctttgttatttctgtaatacggttcactccattttcctcccttcaaacgtattcagcacttatatattacttcacaaatattttaaagaaaagcgtaccactatttttaatgatacgctcatcattattaaatcacttcaaaatgcttcaatgcatcttttatcgcttccactttctccaccgtcggatgcttcctcggttgcttcaattcctccactgcattaggagcatcatacatcggcaagcctaaatctctctttacctctgcgatatatgcggtatgtaccttgaagccgtattttgcttctatgtactcctttatcattttgtaggtcactcgctccttgggcttgtatgtttcagctcttttagcaatattatcaagtggaacttttccctcgccctcgccaaactcaacttttacgttgatatgtccgtctggctttttgtgggaaagcagtacaaccgtctccacatgcaccgtcatgggaaacatatccaccgggcacacctttttcacctgataccctctctcgcaaaggtatttcaggtccctggccagggtggcggaatcgcagcttacatacacaaccttttccggctgcatttccacgatggtattgagcagtgtttcatcgcagccttttcggggaggatctacaacgattacatccgctctggcgttttcccccggatgacgggcagcataatctgcatagtaatcaggaaggacttcttcagcttttcctacatagaattctgcattctttataccattcagccgtgcattgcggcgggcatcttcaatagcggcaggaacaatttccacgccgcggacaaattttgctttctgggcaaggaaaagagagatagttccaatgccgcagtaaagatcccacactgtttcctctccgtgaagatctgcatattccagagccttggaatacagttcccatgtctgctgtggatttacctgataaaaagacaatggagaaatctgataagaaatatctccgattttatctgtaatatattcctgtccccagagaacctggattttttctcccaggattacattattacgatttttattaatattcagagtaatgctggtcatacccgggatttctctcagagctttcaccagctcctgctgatgcggaagcctgctgccattggcaacaatacagaccatgatctctcctgtatggtaaccgtaacgggtaaaaatatggcggatcaggccttttccggtaacctcatcgtacggggagatatcataggtttccatatagtcaattacacggtccaggatttctctgttctgcggaacgccaaggacacagtccctgttttcgataatgctgtgggtgcgtcctgcatagaatcctgttacgatttttccatccctgttccgtcctaccggaaactgtgctttgttgcggtaatggaacgggtccttcataccgataatgggttccatgggcagattggcaaagccgccgatccgttccagatgcccgcgaaccttgtcagctttaaattccagctgtttttcataggaaagcgcctgaagctggcatccgccgcactgacgggcagaaggacataccggctccgcacggtcaggagaaggcgtcaggatttccataagtcttccatacccatagttcttttttgctttcatgatcttggctgtaactctgtctccaatgactgcgtcctttacaaaaacagtgaagccatcagctttgccaatgccttcaccatttgtaccgcaatccacaatatctaacgtaaccatatcatttttacgatattccatgaggatcacacttctcctgttcttcttaaatttgactcaaaaagtctgttatatccaagccagtctttttttcctttatctgctgcaaaaatctcagtcagcgtctccattctggcatctgtattgtccgccaggttcagagcaactgcctctgcaagcgcaggttttttcggagatccatactccagttccccgtgatgggcgagaatacagtggatcagttcattttccagcacttccggaaagtccggaatttcctttgccagatcatgaatcatctgagagccgatgatgatgtgccccagaagctgtccttcgtctgtataatcgttctgaggaaaagcagaaagttcttttgtttttccaatatcatgcagcagcgccgctgtgatcagaagatctcttttcagaagaggataagcgcctgccatataatcacagagccttgccacgcttaacgtatgctccataagccctccgataaatccatggtgaactgttttggctgcagaatgtccctggaaagctttgataaactcctgatcttccacaaacagtttcctgagaattgtgttcagatatggattttttactgtgctgatcatatcgcaaagctgacgatacatatcgtctgcactgttttcgctgacaggaaggtaatctgctggatcatattctccctctccggctttgcgcacacgcttgatatttacctgcatggctcctgcaaagcttgtcacatcgcccattacatctatgtagtccagtgcatcaaattcatcaattcccaatgagtttggatcccagatctttccgtccagcactcctgtcttatcctgtaaaataatgctgtcataaggtttcccgtttttggtcaccgctgactgtttctgtttacacagataaattccgctgattctgtcgccttcgtgtaattcattaataaaacgcatttctttttctgcctctctatttttgttttatcagtacatctaattctacgtccacatattctcctgatggatttttgcgatatactgtaagttctgcctgctgtcccggtttcatactctgaagccggatactgtattcccgcattgtggtaatttcttctccgttaatccggtgaagaatatctccgctctgaacgcctgcaaccatagccggggaattactttctacccggtcaatataaacccctcccggaatatctctgctctcagactgtatttgagaaatcgttgtcccgatcagtcctgcatagcagatgggttctccgttggaaagcttttccagaagagttccaagctgtgccaccgatacagcacggatcacgcagcttttttcttcctcatgatccagaataataccaatcatctttccgtccatatccagaagcacaccgcctccgtcattaccggcggccatattcgttgtgatcagtgtatattctgcatccgggatagtaagctttccggaaatggcggtaatatttccgtaaataagggaattggtatctccatttggacttccgatcgcaatcaccggctccgtctgctgacggtcgtcctgcggagccagagtcactgcagtaatctcatccctgtattcctcttctacattttttaccggaaccctgacgactaccagctttgtccggggatctgctccgcacagagttccctctgccatcactccattagaaaatgtaattttgaatttctccgctttttccagctcatccgatgtagtcagaatataaaacgcatctttgtttttcagaaaaacaataccttcttcatccccataagtgaggagggaatcgttcagtaaatcctctgtgtccgtaagtccggtcacctgaaccagagccttgcgcggttcctctgcaatgtcccagatggttttatacacatttttcaaatggtctgctgaatctgcatcttcctcctcttccggctgaacactttccgccgtctgtgtatccgttcctctggcgaattctgagccggcaggcggtgataactgtaccgtctccggttttttcgcttctttttcaaactgtctgaatatattgggcacaaaagccattaccgttacaactgcacaaattccgaatacaattccacaggatgcagccattgccagcctgcggagcactgtctttttatctatgggccgttcttttattgtctcttttataaatggatagtcctgatcctttttatcaaccataaccattctcccataaaccagataatttaggtgtattttagcaaaaatatatgaactttttattaacaaaaatatactttttccttttcattatgaaacaaatcatgtatgataagattataagaagaattttctttcctgattctgtgtttcatctggaaaaaaacatcagaatctgttatgataaaagactaaatactatcagaatttacaggagatgctgcttctggcagcgaaaaaagttatgaatcaaaaagcattatcttcacttgagtatccaaaaattatagaacggcttacagaaaaggcttcctctcctatgggaaaagagctgtgccggaaacttcagccttctactgatataaataagatccgtctcatgcagactcagacaaaagatgccctgacccgtctttttcagaagggttccgtctcttttggaagtgtaaaggatatccgcggctcactgaagcgactggagatcggaagttctctgggtattatggaaattctttctgtctgcgcgcttctggaaaacacctccagagtaaaagcctattcccgaggcgaccggagcgaccttccctctgattctcttgacagcatgtttgaacagcttgctcctctgacccctctgtcttcagagatcagaagatgcattctctctgaagatgagatcagtgatgatgcaagtcctgcgctgcgccaggtacgaagaaatatgaaagtaaccaatgacaggatccatacgcagctttccggactggtaaacggaaacgcccgtacctaccttcaggattctgtgatcaccatgagaaacggccggtactgtattccggtcaaagccgaatataaaggacaggttccgggcatgatccacgatcagtcttccaccggttccactctgtttattgagcctatggctgtggtaaagctgaataatgacatgcgggagcttgagcttcaggaacaaaaagaaattgagatcattcttgccggtttaagtgaacagattgcagaagaacgggaagccattgccctgaatctggaactgatggtacagcttgactttatttttgccagagccggtcttgccatggatatgaacggaagcgaacctgtttttaacgaggaaggccgtgtgctcctgaaaaaagcccgccatcctctgattccaaaaaagaaagtagttcccattgatatccgtctgggagatgattttaaccttctgattatcacaggtcctaataccggaggaaaaacagtttctctgaaaaccgttggtctgcttactcttatgggtcaggcaggacttcacattccggctcttgaccgcagtgagctggctctttttcatgagatttatgcagatatcggggatgagcagagcattgaacagtctctgagtactttttcctctcatatgactaatattgtatccttcctggaaaaagcagattcccgttctcttgttctttttgacgagctgggtgctggaaccgaccctacggagggtgctgcccttgccatttccatcctttcctatcttcatgataaaggaataaggaccatggcaaccacccattacagcgagcttaaggtatacgcactttctacaccgggtgtggaaaatgcctgctgcgaattcagcgtagaaaccctgcgtcctacctaccgccttctgatcggtattcccggaaaaagtaatgcctttgccatctcttccaaacttggactttccgatcagatcattgaaagagctaaggaacagatcagcgaacaggacgaatcctttgaggatgttctttcttctctggaagaaaaccgcgttaccattgaaaatgaaagactggagatcgcgcgttataaagaagagatcaaaactctcaaagcccagctggaatcccgccaggaaaaactggatgcccagcgggaccgtattctccgccaggcaaacgaagaggctcacaaggttctggaggaagcaaaagaatatgctgaccagaccatgaagctgttccataaattccagaaaaataatgtggatacctcggctgtggaaagagagcgccaggaactccgcaaacggatgaataaagcagaaaaaaacatgtctgacagacaggaaacaaaaaaaccgaagaagcagcttacggccaaagatatccgtccgggagactctgttaaggttctcagcatgaacctgaaagggactgtgggaagccgtccggattccaaaggtttcctctttgtgcagatgggaattatccgttccaaagtacatctctctgatctggagcttgtggatgagcctgtgatcaccaccccttctcttcagaaaacaggagccggaaaaatacgtatgtccaagtctgccagtgtttccacagaaatcaatcttctcgggcgcacagtagacgaagccattgccgagcttgataagtatctggacgacgcctatattgcccacctgaaaagcgtccgtattgtccatggaaagggaaccggagctctgaggaaaggaatccatgattatctgcgccgccagaagcatgtttcctctttccgtctgggcgaattcggcgagggcgatgcaggcgtgactattgtagattttaaataacagagggaggatttcctaatgacatccaaacagaaaattcttatcgttgatgatgataacaacattgcagaactgatttctctgtatcttacaaaggaatgttttgagacaaaaatcgtaaatgacggagaacaggcgctgagagaatttgactcttttcatccggatcttctgctccttgatctgatgctgcccggaatcgacggatatcaggtgtgcagagaactgcgtcatacctcagatgttcccattatcatgctctctgcaaagggcgaaacttttgacaaggttctggggcttgaactgggagcagatgattacattattaaaccctttgatgcaaaagaactggtagcacgtgtccgcgctgtgctccgccgctttaaggtcagacagccgtctgccccttccggcgaaaaatcagtgtcctaccctgaccttaccatcaaccttaccaactactcagtcacctatatgggaaaacaggtagacatgccccccaaggagctggaactgctttattttctggcttcttctcccaatcaggtatttacaagagagcagctccttgatcatatctggggctatgaatatatcggggatacaagaactgtggatgtccacattaaaagactccgggaaaaaatcaaagataatcccagttggagcattgcaactgtgtggggcatcggatacaaattcgaggtaaaaaacagatgaaaaaaaagctgtccaggaaattcatggaggtttatctttttgtagggctccttggttttctgctggttacgctgctgggttcccatatgatcgaatctcagctggaaaaagatatcagcgcagatctttatcagagtgcctaccggatctcagaaaatgaggatatccggtacaatatttccgcttccagtcttgacagcatccgagaaaaactcactatggttgcagactatcccaataccatcatctggatcattaatgaaagaggagaggttgttctgagtacccggaaggatatttctccgggagatcccattcctcttgcaggttttgatccttccatctggggaagcacctattatcaggtaggctatttctacgggtactttgaagatgatgcgcgcctcagcgtaatcgctcccattacagacaacatgactatcaaaggctatgttgccattcactatatgatgagccgcctttaccagcaaagaggcagatatctttttatccttcagtttctgttcctgcttgtctatatactgatgtccctgctcctgcttgtgttccgtcagtatgttcacaaaccgcttacagaaataaaaaaaggagttaccgaatatgcaggaggcaaccttaactataaaatccctgtttatacagacgatgagcttggatatctggcaaacaatctgaactatatggcagataaaatgaaccggaacggagaatatcagagacagtttatctccaatatctcccatgacttccgctcaccgcttacctccataaaaggctatgtggaagcaatgatggacggtacgattcccgtggaaatgcaggataaatacctgaagatcattgcctatgaggctgaccgtctggaaaagctcacaaaaggcctcctcaccctgaatgaactggatatccaaaaacgtctcctgaacattcagacctttgatatcaacgaggccataaaaaaagctgccgccacttatgagggagactgcaccagacgtcatattctccttgaactgattctttccggaaaagagctgtacgccagggcagatgtggaacagatccagcaggtgctccataatctgctgaacaatgccattaaattcagcccggatcattcaaccatcattattgagacaacagaaaaaaatgaaaagatttttgtttctgtcaaagaccacggaatcggcattccaaaggaaagcctttccaaaatctgggaacgcttttataaaacagatatttccagaggaaaagaccagaaaggtaccggtcttggtctgtctattgtaaaagagatcatccatgctcatgatcagcacattaatgtgatcagtaccgagggcattggaacagaatttattttcactctggaaaaagcacgataggatttgtctcctgccgtgcttttcatttacctgaaatatttctctttccattccgggcaataacattatgcttcaaaaggactggaaagaattctgtcctcttttacaagatagattcctcttggagtcacccggatttcaggaataaccggaagcgccataaaggacaacgtgataaaaggatcaaacccttttttgattcccatttcatatgccctggggatcatttttcccagaagtgcatttacattttcataccctgcatcactcatcagccccataaccggaagcggcagtgtatcgtaaacttttccgttctgcatcagcgtgtacccgccctgggtgcgcaaaagttcctgcacagccagatacatgtctctgtcattgtctccgatcacaatcagattgtgagaatcgtgagaaacacttgacgcgatggctcctcctgtgatcccgaacccttttacaatgccgactcctgtttttcctgtattcttatggcgctcaatcactgcaattttctgataaatgccatctgcggcaaaaatcctctctcctgcttcttctctgaaaggaacctcctccacaagatcttctgttacgatctgtccctctaccatctgaagtacatgggctttttctcctgtatgtacaagcctcagatccttttcactgaaattctttaaatgaacggtatttttaagataaggggagcaggggcggatctctgttttttcatctttctggatttttatgcctttatgataaacttccagcacgttcatgtctctgagattatccagaaccaccagatcagcctgatagccaggagcaatggcacccagatgcttcagtccataacaccgggcggcctggatcgttgccattttaagcgccttttccggagccagtccaagctgtaccgcgcgttttacattgtaattaatatgtccctctctccgtatctcttcaatgtgtttatcatctgtacaaaagcagaatcctgaagtatctgtatgattttttacgataccatttataatagcttccagattgcgcgccgcactgccttcccggatcagcacctgcagaccgtttcggcattcctccatagcatattcatagtccacacactcatgatccgttgcaattcccgccagcgcataagctgccaattctccctcttccagaaacggcgcatgtccgtcccggatacgatcctgaaacaatcccagtttttcatgcatggaaacactgccattgatcacggaaacggcgtccatcacctctccaagtcccagaattctcgggttattcagataactcttcatttttcctgctgtcagagtgcatccattgtcatctacatgggttgcaggcacacaggaaggcatcatcacatacacattggcaggaacatcctctgtctgctccagaatataatcaatgccggctgttcctgacacattggcagattcatgaggatccacaataaatgtagtagttccgcactgggcagcctgacgaatcagctctcccggagtcacaagagtagattccaggtgaaggtgactgtcaataaagccagggcagagatactttccggaaagatctgtttccctctcaccgctgtagcttcctgttccaagaatcagtccgtctgcaacagccacgtcgcctttgcggaactcacctgaatgtgcataaaaaatattcgcatttttcaaaacaagaggggcctttcgaattcctcttgccatttcagaatatatacgatactgttcaagctccatatccctgcctcctttttgatatctgagaatattccggctttatattctcataaatttttgctttttatctgtacatacagatttttctttatattaaagttatatttcaattatattatcatttttcttacatattttcaattataatttgtgtgtttttaataaatcgcagcgtttttgttttcttattttggtttttatccataaatattctaaaaactattccatctctttctggctctgatcctgtatgttgagcatacagaacttatttattttttatatctgtatgatacatactgcagcagattcactcttactcttttgctcatccttttatgacagataaaataaccactccttatagaccagaacagccttatatctaaaaaattcctttattaaagagatgctgccagtatcatttgctgcaaaacaaaaactctgagagcttccatacccggaatgtatctcagagtttctctttttattcagtacagaaccgcccctcagacaatgctctgcctggtttcttttatttccagtgatattttgtaagctgaccctccagctgcatatggctgaaattatgctgtctcagagcctcataaagaattactgccacagaattgctgagattcagagaacggatatcgttgatcatgggaatccttacacagtgttcctgatttttaagaagaatttcctccggtatgcctgcgctttccttgccaaacataataaagcagtcctcctcatagctgatatctgcataggtctgaggtgcttttgtactggcatagtaaatttttgcccccggatttctgttcagaaaatcctcataatcaagataagtagttacatccagatccttccagtaatccattccggctctttttaatgccttttcgctgagactgaagccaagaggctcgatcaaatgaagcctggttcctgttgccacacaggttcttccgatatttccggtatttgccggaatctccggctggtgaagtacaatattcaacatatctgtttctccttgtgtttttctggaagtatactgccattttccttgtctgtattgtgcatatacagccttttgtttctccctttacagaaacgtcacatttatgttctgttttatattctgctttcctgtttccgtaaatgccatgtctttagttctgtatatctctcatttatggcttttctgatttttatctttgcccggaagcaggcctttatttttccaggagcttccccaggaaaattttgtaagctcatcttcagcaggacgttccagatatctgcagttttctccgctgtacagtaatctgtcattgccctttacagcctttccgatcacagccgccggaattcctttctgtctgcagaaaagctcaagctccgccccattttgcgtgccgatcaaaagcgccccttccgaaaaaagcctgtaaggattcagatcaaacctctcacagatttctatggtttcctgacgcacaggtattttgcggagatctgcctgaattcctgtttctccggcctctgccattttccacaggccggcaagcacaccgcctgttcccagaacataaagcgcatctgctcccatattccgtgcagctttccatacagaggatttttctgcacaggctctttttctcccgttcatctgctcacaggtaagattttcccggtctcctaaaagaacctccgcgtcatatgctccataaagagaggggcttctctgcgcatcccagagaaagccttctgaaaaatagcttttaagggtttctttttccttttctgtgatcagagctgtccctgacagggcgatatctcctgcaacaaccagatcatcccctgccttcagttcacctgtgatctcagctcttaatgcttccattgctttctgtccaagtttcatgtatcgtttcctctgtcagacaagaatggacaggatacttggaaccaccatggcaagcacaaggatcacagcgatcactgctgtaattattttacgttttttcggattaaacattcccatatttgtcacctcttttatattacggatcacgcttctgtttctatatcatttaccgggttccgttccaaaaaaatctgttctgcccgggcattgtttgtaagagggtcacgcgcttcataatcaaacagaaccgcgcttccgtcaccaaatacttcaatgtgagctgtttttggaattttatttgctttcctgtaatttctcacagatgcttcataaggcttctgatccatagcaaaaaccggacgttttttcagcttttctctcagataaagatcatataccatatgctgagatgctgtatttacaggaagctgtgtcttctctttcagaaattccaggagaatctcataacgcctgagcctggaatgagagatctcttcatatcctttttcctcataataggctcccagactttcataaaaagaaaacatctcctgataaaacgtctcgatccaggaaagcgttttccggaactgaccactattataatacacttccaccatactttccaccattttcagcttcaaaatatcctcataagaaagccaggctgtagacagaacctcataaggctctttttccttgtacagaatttcatatttttgcgcctcatgatacatggaagagcctttcagcaccttcagaaatcccagctgaagctgatccggcttcatgcggtaaacctgttcaaaggaacgccggaagctttcataatcctcacagggaagtccggcgatcagatccagatgctgatggatatttccaaagctctttacacgggccacagatgcttccagctttttcagatccatgttcctgtggatcgcacggatggtatccggatttgtggactgaactccaatctcaagctggatcagtccggggcgcattctgctcatcagctccagctcttcctcacgaagcagatcagcggatatttcaaagtggaaattcgtcactccgttgtcgtgctccagaatatacttccagatttccattgcatgatcgtgtttacagttaaaggtcctgtccacaaactttacctgaggaacctttttatccaggaaaaactgaagctctttttttacaagctccagattgcggaaccgaagctttttatcaatggaagaaaggcagtagctgcaggaaaaaggacagcctctgctgctttcataataaatgatcctgtttgcaaaatcctctgtctgctcataggcaaagggaactctgcttaaatccattacttcccgccatccgttgtgaaagatctcgccgttttcccggaacgcaattcccctgatatctgccagcgtcccttttttttctatgtaataacgggcaagctccagaaaggtttcttctccttcccccaccataacgcctgttacctgaggcatttcctttaaaaaattttccgcatcaaaagaaacctccgggcctccgacccagaaggccgtacccggaagtatttttttaaggtcaaagatcagttcccggacaaaggaaatattccagatatagcaggaaaaacaaactacctctgcgccgcttctgtaaatctccttcaggatctcatcctttgtctgattaatggtatactccccaagaagtatgtgttctttatattcagatgcaaacgctctgagatcatacactgccggattggagtggatgtattttgcgttgcatgctgccagcaaaattttcatatgtcagactccccgatgcccggctcagtcattaagaagagcaagcagatcattcttggaggtaagtcctacgacacggtttgcttcttttccgttcttaaataccagaagagtgggaatactcataatccgaaactgctgggcaagagcaggttcctggtccacatccaccttccctactgtatatccctcagctgcgatctcttctacaataggcgcctgccgcatacacgggccgcaccaggttgcccagaaatccaccagaaccggcttttctgactgaagtacctctgtttcaaaattctgtgatgttaaagtaatttccataatcaatcgctcctttattttttgaattttcttcggatatattttcctgcgctgattcctgccgcgcagccttctgagacggctgtcgctacctgaagcaggccgcctgtacagtctcctgctgcaaaaagtcccggaatcgttgtttccatttcctgatttactctgatatttcctttttctgtaagttcagctcccatctgccgggcaatctccgtacttcccgctgttccaagagctacgaatatcccgtcagccggataaaaagactccttctgaccatcactttccaggatactcatatcctgttccatccgaaggccggaaacagtattctcaccttctactgactggattttcatggtattcacctgaatatcatgttctcttgaaaattcaggcttttccccattggtataaatcgtcacggaaggagtcacatttttcagctgctctgcctcatgaagggcaaaatcactgtttcccagaactgcaacctgttttcccctgtaaaaaaaggcatcgcagatagcgcagtagctgactccttttccttcgtattctctgattcccggaatagaggacgctgcccgtttacttcctgtagcaaggatcacactttctgtttctatgtctccgtctgttgttctgattgtaaaagtatcaaatccgctgatccccagaacctgggtttccatgactctgactcccagagcctttgcctgggcaattcctctgtcaaaaagctcctgcccggaaagaggcttctccaggccataataattttctattttttctgctttttcaagggctccgatccctgtgtggatcacaagaggatccagatttcctctggctgtataaagagctgcggaaatccctgccggacctgcgccaatgatcactacatgttccatttccattcacctgcctttttctatagtatactgttttcctgaaaagatttctgtgattttatcacagaataaaaatttctgttttggacaaagcatacaagtccgattcaaacttctttgaaaataagaatcacgaccaccggcttgctctaacaataagtaagacagaaccgtccagaagttctgaactgattctgtcttattttattcacatttatacaatcctgtcaagggcacagatctccacgccctcatcggtcagagctctgcggattttttccacaaacgcaagggccttggccccgtctccgtgaacgcacacagaatctgcctgaataggaatatcctttccggtaattgccgtaacctttttctcttttaccatccgcactacacgggaaaccgcaagctcctcgtctgtgatcattgcgccttctttacggcggtttacaagagaaccgtcctcctcataggcacggtccgcaaaaacctccagcgcggtgcgaagtcccaggtcttttgccgcccgggcaagctcgccgccggaaagagccagaacaataagctccggatcaaagtctttgatcccctgacagattgcaagagacagctcatagtctttggcagccatattgtaaagggctccatgaggcttcacatgctgcattttcatatgatggactctgcagaaggcttccagcgctccaagctgatacagaacataagcctttgcctcgtcagggctgacgcttaaattccttctgccaaatcccatcagatccggcaagcccggatgcgcccccacacaaatgccggcttcttttgccatgccaagagtcttatccatcacaacgggatcagaagcatgatagccgcaggctacattggctgatgtgatcagagggatcaccttatcgtcatttccaatggtataattgccaaagctttctcccaggtcactgtttaaatctactttgtacataaatcctgtcactcctatttaatatgcatcagattttcaataaatcctgtatctgcctttccttcacagaataccggatgtctcatgatctgatactgaaaatcaagatttgtttccactcctacgatcagcatctcatccagcgcagaacgcattttctgaagagcagcctcccggtccggagcatggacgatcacctttgcgatcatggaatcgtattcagaaggaatccggtatcctgtataaagtccggtatccacccttactccgtttcctgccggaagatgaagatgctgaaccacaccgggacttggcataaagttcttttccggtatctctgcgttgattctgcactcaatggcatgaccgcgcagcttcacatcctcctgtttaaagctaagaggaagtcccatggcaactctgatctgctcaatgatcagatccgtgcctgtaaccatttctgtaacgccatgctccacctggattcgggtgttcatttccataaaaaagaattcaccctttgggcttacaataaactcaatggttcccgcattggtgtagtttactgttttcgcagccagtaccgcatactggttcattttttctctggtttcctctgtgatggccggagacggagattcctcgatcagcttctgatgatttctctgaacagagcagtctctttctccaagagccacaacatttccgaatttatctgccatgatctgaatttccacatgacggggattttccacaaaccgctcaatatacatggtgtcgtcgccaaaagcgtttgccgattctctctgagccacattaaactgaaattcaaattcatcctctgaagcagctactctcattccttttccgccgcctccggaggatgccttgatcataaccggatatccgatctctccggcaagcttcagtcctgtttccgcatcataaacaggttcctttgttcccggtactacaggaactccggcttccatcatggtttttcttgcctgagatttatttcccattttatcgatcacgtctgcgtccggacctatgaaggtaatcccgttttcctgacatctgcggacaaattcactgttttcagataaaaatccaaatccgggatgaatggcgtccgctcccatatttctggctgcctggatgatcctgtccatattcagataactgtttctggcagggccctctccaatacagattctctggtctgccagctgtacatgaaggcttttggcatcctctttggaatagacagccacactgcgtatgcctaaatttctgcaggcgcggataattcggacagcaatttctccccggttggcaatcaaaattttgttaaacaatattcaggcctccctccggcttttataatttttttacacggaacagaggctgtccgtattctaccttctgctcattgcttacaagaactgcttcgatctcacagtcaaaatcgctctggatctcattcatcagcttcatcgcttccagaatacatactgtctgtccattttttacctggtctcccacctttacaaaagtcggggcatccggcgccggagctgaataaaaggttcccacaatgggagaagtgataaagagcttctcatcttcctgatccgcttcttccacagccggctccggtgcacccgcagccgctgctgccggcactccggctgccactacaggaggatgatccagcttgctcattgtgatcttcatatcgccctctttcagagtaaattctgtcagagaagaattttcgattatttttaccagtccttcaattttttctaaatccattcgtatctctccttttctgctgcattttctattgatacctgaaggtacaggctgctgctctcacagcactgtcctgtacaaaactttattcgaataatttcctcagtctttttgcaaccagtctgcagtccagaacctctttgcagggctgatgtatgatctttctcatggcatccagctcttcgatttctttcaggtaaagagcctgggcttcctgcacggaaattgcgcggaaccggagcttctggtctgtttttctctggactactgccggaatatctacagacgccactgtggcgatctttccgtatcctcctgttgtctgtctgtcagaaagaagaatgatcggttttccgtgagagggaacctgcacagagccaaaagcaattccgtcggaaatgatatctgaggtttcctttggagcgataaacggtccctccagtctgcagcccattctgtcaaaatcacttgttactgtatactcgctgcctagaaatgtctcgattccctgtctgctgaaaagctcttcctgaggtcccatgaccacgcggatctctgcctggtcctgatcaaaattttccggctccagctttctggaaaggaaaaacggaaggtatcttctctttatacggaaattcatgtaatctcccgcctgaagcttccttcccttaaagcctccgattccgcttttcatattggtgcatcggcttcccataaccaccggaatatccagataactggaaaaggcaatatatcctctgcttcctgttcttgcgcttccgaatttcagaatatctcccttattcatatagagagccgtgtacataggtaccggttctccattgacctgaggctgaaaatctcctccggtaatggcaataatggttgctgatgtaaattccagtgtgggaccgatcagcgtcatttccagtaccgcctcgttttccggattgtccagaagaagattggcgattttaaaggaacgcacatccatgacgcctgccacggaaaagccctgactctgatatccggttcggccaagatcctgaactgttgtcaacattccgccttttaatacacgaattcccattttacacctcttcctcgtggatcacgcactgatattctccacgttccacagcatccttgatacgcagatattcttcctcgtccaccgggacaaacctgatataatctccggcttctaccagaatcggcacttcccggtccggatcataggtttttaccggagtcatacccataagctgccagcctcccggagaatccagtggataaatacctgtctgagaacctccgattcccacactgcctgcactgatccgtattctcggattggcaagtcttggggtatggagccgttcatccagtccccccagataggtaaagcccggcaaaaagcccagcatatagatcagatagtcttttgaggaatgaatgcggatcacctcttcctctgtcagacctgcatgctctgcaatgttcgcaatatccggtccatattcgccgccatagcataccggaatctcaaaaatccttttgcaggtctctccggcttttacttccacctttaccagtgcctgcattctttcccggatctcatcataggagatcactcggggatcataattgatcagaagagaacagaatgcaggaatcatgtccaccacgccctcaatgtgctgttccttcataagctgaatagtagcagaaatcttcctgttgatctccggactgatctcctttccgaattcaatcaaaatagaagaatcccctgctgttaaaattctgatattctgcatgtttttctccttgattcataaatatcagaaaaaggtgtaagcctctgcgaccacacctttccccgttctcactatgctcagaataaacttcccagatttgatacaaaggttgtgattccaagataagcagaaataataactacaataattccaagtaccagaagccatgcgggatgatgataattttctcccataatagcctttttctttgatgcgatcagacagattcccagagtgatcggaagaatcagtccgttcagagcgcctgcaaccacaagaagagttgccggatttccaagaatcagcatgatcagcgtagatgctgcgataaaaccgataatcacaccattctcgtgcttttcgatagccggatggaaggtctttaaaaaggatacggaagtataggctgcaccaatgatagaagtaattgccgcacacaaaagaacaagtcctgcaaaacggtatccgatctctcccgcgccttttctgaacgcatctgctgccgggttggcaggatcaagagccacaccctttactactacgccaagcactgccagaaacaggaaaatacgtacgatcgttgcaataccgattcccattacagagcttttgttgatctcttttaaattcttttcacctgtaatacctgcatcgatcagacggtgagctccggcaaaggtaatgtatcctcccactgttccgcccagaagtgtgatgatcgcaggcacaagagcctgtacccctgcatccggaacaaacgtattcttaatggctgatcctaccggaggctttacaactacgatcacaataaagataacaacgatcataattgctccgagaacctttgtcagtgtgtccatggcgccctttgcatttctggaaagaaataccaggattgccagtactccggcaagtacatatcccaccttggtcggaattcccagaagggtattaaagcccagcgcacctccgccaacgttgccgatattaaataccagaccgcctaagaccaccataaaagctaccagatatccaagtcccggaagcactttatttgcaacctcctgtcctctcagtcctgtcacgcacagtactctccagatattcatctgcgccactgctgacagtagaatggagatcaggattacaaatccgaagcttgcctgaaaatcactggtgaatttagatgtctgagtgagaaatccaggtccgatcgctgaggttgccatcagaaaggctgcacccagaagcgcacctccgttcttctttttttcgctcatgctctttcctccttttcgtttttgatagaaaaagacactctgcgttgcgcagagtgcctgcttcaaactctttgtttattatatcataatttacagtatccaacaagaattttttgattaacccacaagcggatatttatctgtcagtgtttttacaagggcctttgcctgttctctgttatcacggcttttcagcatcagagaaatggcttccgcgatcacatccatatcttccggcttcattcctctggaggttactgccggtgttcccagacgtacgccgcttgttacaaacggagactgaggatcatttggaatggtgtttttattgcaggtaatgtttgcctcgtcaagaagattttccatttcttttcctgttaccccaaggtttttcagatctaccagcatcagatgattatcggttcctccggatacaatatcaacgcctctgttctgaagtcctttgcagagcgcctgagcattttccactaccatgcgggcatactctttaaattccggctgcagagcttctttcaggcataccgccttggcagcgatcacatgcatcagagggcctccctggattcccgggaaaacagctttgttaaagttaaatttctttgcattttctgcgctgctcatgatcagtccgcctcttgggcctctcagtgtcttatgtgtggttgttgttacaacgtcagcataagggacaggacttggatgctgtccgcctgccacaagaccggcaatatgagccatatccaccataagatatgctcccgcctcgtctgcaatctcacggaacttcttaaaatcaatggtgcgggcataggcactggcacctgcgacgatcattttgggcttacattccagcgcaatcctgcgaacctcgtcatagtccaggatgccgtcatcatttactccataggaaaccgcatggaaataagtacctgacatatttgccggacttccatgtgtcagatggcctccgtgggcaagatccatgcccagcacggtatcccccggcttcagcattgcaaaaaatactgccatgtttgcctgggctccggaatgaggctgaacatttacatattcgcagccaaaaagctctttcgccctgtcgatcgcaagctgctcgacttcatccacacaggcgcacccgccgtaaaatcgtttgcccggatatccctctgcatatttatttgtcagcggacttcccattgctgccataacagccctgctcacccagttttcggatgctatcagctcgatgtgagaattctgacgctgcacctccgcctgaatcagatccgcgatctctttatctgtctgctgaatttcttctaatgaatacatgctcatcctccttgtaaatatctttctccgtaacgaaacgtccatgtctgcttcagactctctgaatccctcagaccttccgtgcttaaaactgttactgctctccgcaacactagaattgattatacctgaatcccctatctatgtcaacgagaaaaagacatttgtccgtcatacaaaaatttttgtattctttttcaatttcattaagttttttttgactatttatgatatcttttttataatagagtgaagtattaacataaaaggagcatttgctatgagaggctttgaatattacacccccacaagggtgatttttggaaaagatacacacatgaaggccggcgaacttctgaaagaatacggctgcaaaaaagttctgatccattacggcagcggaagcgctgtttctttcggacttctggatcagatcaaatccagccttgccgaagccggggtggattttgtcacgctgggaggcgttgtgtccaatcccagactcagcaaggtttgcgaaggaattgagctgtgtaaaaaagagcaggtggattttcttcttgccgtaggaggcggaagcgtcattgattcctgcaaggctatcggctacggcgttgccaacccctggacagatgtatggaatttcttcctgaaaacagaagtgcccaaagactgccttcccattggcgccattcccactattgccgcatcaggaagtgaaatgagcggttcctgtgtgatcaccaacgaggacggatggatgaagcggggaagcaccagaagcgatctctgccgtccgaaattcgctcttttaaatcccagacttacttatacactgccccagtaccagactgagagcggatgtgtggatattctcatgcataccatggaacgatactttgtcaacctggaaactatggagatcactgacagcatcagcgagtccctgatgcagactgtgatctacaatgccagaatacttatgaaagagccgggcaactacaatgcaagggccgaagtgatgtgggccggaagcctgtcccacaacgggcttacaggctgcggaacaggtggcggcgactgggcctgccatcagcttgagcatgagctgggcggtctgtatgatgtggcgcacggcgccggacttgccgctatctggggaagctgggcacgatatgtatatctggaaaacccggagcgcttcgcccagtttgcaacaaatgtatttgatattccctgctatgtggattttgaaaaaacagcgctggccggcattgaagccatggaagattttttccgctccataaaaatgcccaccagcctccgggagctcggtcttgatctgaatgaaaaacagattcatgagcttgcctttaaatgcagttttgaagacacccgtaccatcggcgtcttcaaacagctgaatatgaaagacatggaaaaaatctatcttatggcccgctgacccttccggtctgcctacctgataactgtcttttctatcgaaataaagtttttgtcagtatcctgaaatttcaccgcagattcctgatctgtttcagaaataaaggtgaatttcaggattcttttttatttatgcagaacagcactttcagagattagaaaacttaatcagccggaagcacacctgttctcttacagagaaatacgtctctcctttccgtcatatacaaaacgtttctccaccttatctccttccaggatcacgcggcattcacgtcccttcagcccctgtgcaaaggtatgctctgctgcgccgattgtcaggcagtgctcatcatccttccaggtaagagaaatctggttatatttgccctgctcatatgcatatccgtctccgtcatcctcatacagaacaaagcttccgtcagcgcccggataaatatggatctcaaagggtgtatccaccgcctcgtccgcatagcgcattttctgctccatgggaatgacagctccggcctttacaaataccggaatatggtcaagggaagcgtccgcttccacctctgtgcccccctcatattctttcagcgtatggaaatcataccatttcgttcccgccggaagatagcagttccagagcttctcacggtcaatggcgcggctttccctctcataatacataggttctgttaccgggcataccagaaggctgtcgccaaacatatactcatctcccagcgccgctgcgcgtttatcctgtgcaaaatcaaaaagcaggcttctcatcattgtataatcatctgtccagattcttgctgcattggagtaaatataaggcatcagtctgtatctcagctcaatattctttacaagcgcatcatagaaaggctcgcctggcctgccgaaattccacacctccctgggggtgtccgtgccgtgtgaacggaacatgggaagaaaaactccctgctcaaaccagcgcacatacagttctctgtaaccgtaatcctccacaccttcctcgtaatcccctctccagaaccactttggcgttggatccttgctgcaggagcagcctctgtgctgccagttttcgtttacggtaaagaaaccgccgatatcaagggtccagtagggcataccgctcatacacatattcagcccctcatggatctgttttttcatggtatcccaggaggcaaaaatatctcctgaccacaggacagttccgaatttctgactggatgcataaccggagcgtgtcaggttcagaacacgtttgtccggattggactttctctgattttcataaatcccctgagcatgtgcagccgcataaaggtttgccctctctgccccaaggaatctgcggtgctcgtctcctaccaggcggaaacgctcccatggctctcttttaaactcaccattccagtccgggccggaaaagggctctgtagaatcacaccaccaggaatcaaagccgccggaaaacagctccctctccgcctgtttccagtaaagttctcttgcttcctcagaaaaagcattgtaggtggcataatcataaaaaagatgtcctgccgccttcatctcctcgtaatcctctgttccggaattcatattcggccataccgataccatggaatgcacatgcatatcgtgaagcttctgattcatttctgtcaggcttggatagcgttctctgtccacacgcttgtttccccatttgcccggctcccaggtattccagtcctgtaccacacagtccagaggaatgtcaagatcacggtatttctttgcaataccaactacctcgtcctgagttttgtaggcttctttggactgcacatagccaaaggaccatttgggcagcatcacggcccgtcctgtaagaaaacggaagcctttgatgatctcatccaggttctctcctctgataaaataataatccagctgctcgatcatatccagatacagccaggagcctctgcagtcgtcgttaaaggtcatcagggagccgcagtccaccaggattccatatcccctgtccgataccaggaaggggatcgggatgcgcatattatgctgataaaggtactgaacatttccacgataatcataaatgccttcctccccctgtccaagaccatggatatgctcgtccggctgccagcagaagttcagttttccgtgaaaggccatgtgatcctccacagccttcagattctgcacaaaatttctctcgccgtctacggtctgaactcttttgataacaggctcctcgccccctgtagaataaaccataagaggagcctctgtcagttccttgcggccctccttcaaaagtacacggccgtcatcagcattccgccatacaaagcctccgtttttgctgtcagcctccagaaccactctctctgtccggaaaacagttttttctccgtcctcactgacactaaaagagctttccggacataccttaatgccaacaggtgacttttgctcccagttctctctttttgtgtaagaacatctgataatattgtcacgtactgcctgaaccctgcagtttccgtcctttaatcgaaattcccactcatgtttctgcataatacccataatacttctcctttattttcagattaagcagaaaaagggcatcagccctttactgctccggcggtctgtccgcctacgatatgcttctggcacaccagatacataatgataaccggcagacaggtcagaagaatgtccgcacagatcaggttccagctctttgaatactgtccgaagaaattgtatacagccagtgtcatcggccatttttcggaagaattcaggaaatacagaggcattacgaactcattccatgtattcaggaagcagagaactgccgctgtcaccatacttgatttcatcatcggcatgacgatattaaagaaaagtctccagggtccgcagccgtccagcactgccgcctcatccagatccaccggaacctttgacacaaagccgtacaaaaggaatacagaaaacggaagctgcattgccacatacagaagaatgatacccagccttgtatcatttaactgtgtcacctgcatcactttcatcagagatacatagttaatggggatcacaatacccagaaccatgtacatatacagtctgttgtcagcttttccccgtcttctggcaagtacataggctgccatggatgcaaggattacagtaatgaccgttgcgcagcctgcatacagaagactgttcaggaagctggttcccagctttcctttttcaatcacaactgcaaaattactgaactcccaaatctttggaagcgtcagagacaaggtaagggcctcagaatccggtttaaatgcattgatcacgatcagaagaagagggatcagcatgatcagagaaaaaatccatgcaaggatattttttaatattgtcagaatggttttcttggttttcgcattcattactcgatcacctcatctttcgtcagaatcttaatcataaagtagcctacgatcaccataaaaatgaacataacggaactgatggtggtgccctgtgcatacaggccctgggagaactgcttaaatactgcagtgtacataacctctgttctgtgtcccggtcctccgtttgtcagggcatataccatatcaaataccttcaggccataaagcacgttcagtacgatagttactgccagagtctgcttcagcatgggaagggtaatgtaactgaatttcttaaatccgtttgctccgtcaatacttgcggcctcataataaacattggggatggcaagaatgcccacgatcagaattgtcataatgtatccggttccacgccagatatcaacccccataacagaccagaatgcgatctgcggatcggtaagccatctctgtgtaagactttccagaccgatcatccgaagtccctcattaagaagaccgtttttcggattcagaatggaagtaaatacaaggccaatgatcagaatagaaagaactgacggcatgtacattacgcctctgtggaaattctttgccttaatattcctgctgagggcaagggcgaacaaaagtcccagtcctgtttttgcagcagtggtcaccacagtaaataaaagtgtgttcagtatgtactgcagataatcctggtcgccgctgaatacatcaataaaattttgaaagccaacaaaattcagctcctttgaatatgcagaccagtctgtaaaagaatagccgattccaatgatcccgggaataacggacagggccgtatagataaaaatagcgcctgctgcaaaataccagggataaatctttgatttgttcacaaaatcctcctccatttctctttgtttctctctgtttttctttattttagggtaaaacgcataatttttccatgcactcgcctgttttatttatgtatttttttaaccagatgtggtacaatatgaacacttaatgaatccaagtcaaagacgcaggatgaatttagtgagaatatatgcctggacacttaacgaggtcgagcgatgcgaacaccaagtttagtgaccatggtgcaatggcaaaagataaaatcggaggtgtgtcttatgtttgccagacatggaaaaaagagtattcagaccattctgttttaccgttttttatcggtaaccgcagcgctgctgatcatagtctcagccattgtctatctgatccagtacacaaaaatgtacaaaaatatggagaatgacattatccgcacaagctccagtattggcgatgccattgaccttcagatcagccagatggataatatatgtcttaatgtgatcaactccacctccgtaaaagacacctttgctgagtggagccagaacaaaaatgcctccgcctatgagcggcgtcagcagcagaatcagctgaacaactctcttgtttccatacggggaattgacacctccatccgccaggtgaatctttattccatggagtcaggcggatatggagtgggaaactattacggcagactgtccaaaagtacagccgatcttccctggtataagggagcggtagaaaaggacggctaccgtttttttcaggctgacagccatcctcttctctcccggcactcaggaactgagactgacaggttttatttttccctttaccgtatgtactttgacaactaccataatcctgccggctttgtggaagtgtccaaatactatgatgagctttttgaggaagcgctttcgcccaccacttcttccagtattgatatcaccgtgtatgatgaggacggcaggcagatttatccggatactgcctctggcggtgaaaaacgctttgattatttcacggaacttaactcccgtgatctttcttcagacagcgcccggatatataatgatctgaagcagcaaaaagagtttgtcactgtgtgccctctggactacagcggatttactgtaactgcatccattaataacacaggcttttatactcccatccttgccagcctcatgtggattcccctgctggctctcagtctgtttgtagtctgctattttgtggcaggatttttaagccgcaggcttgcccagccactgacagaaatgcaccagtttctgtcacagtctgattccgccggaaagttccagcagatcagtctgaaagattccggagtcatagagatcgaccggctgcgcgactctctgaacagctccatccgcgcccaggaggctgcaacggaatcccttcttgtgatgaaggaatctgagatacaggcccagatgcttgctttacaggcacagatgaatcctcattttctctacaattccctgaataccatcggagctatggccgaagagggaatgacggaggaggtcacctccatgtgccaggatatcacctccattctccgatacatatcttcagacaaagaatcagtttccacagtggaggaggaactggagcactgttctctttatttaaactgtatgaaaatgcgctttaaggacaaattcacttatgagtttgacattggcgatgatcttctggatctgaagatccccaagctgtgcatccagcttctgattgaaaattcggtaaaatttgtatcaaaaacagcgccgccctggcatatccgcattgagggctacattgatgccggacagtggctgatctccgtaaaggacaacggccccggctttgacccggaggtagacagacatctccgatctcagatggatgaaatcctgaaatacagccggcttcccagcctggagctggacggcatgggtattctcaatatttttatccgcttttatcttctgttcggaagctcttttttgttccagttcggaaatctgcccgaaggaggcgcttttgtaattgtaggaggacgttttcatgaaaaagatcaaacattataacatcatgctggttgaagacgaagaactgctccgccagtctcttgccagacacatcgacgctctggacaacggctacaaggtagtctgtcaggcaatggacggacaggaagctctggatgccctgaagcaggaggatatccatctcatcatcacagatatccgtatgcctgttatggatggactgactcttgcccgtaacatccaccagcagtatccccatattcttactgtgatcctgtccggctatgcagacttccagtacgctcaggaggctctgcgccagggtgtatttgactatctcctgaagcctgtgacccgtgaaagtctggaaagcactcttggaaaggcaagccttgctctgcagaaatattacgagctggaggaggacacctccatggcgggaaaggattcccaggaaatcgtagactacgtagttctttatatccgcaatcactacatggacgatattgacttctcggatatttcttcccgtatgggcttcagctctgcgtatctcacaaagctgttcaacagatacgtgggaaacacaccgttaaagtatcttacagacgtacgcatccacgaagccaagcatcttttgttaaataccactcttcccatccgtgaggtgggtgaaaaagtcggctacccggatcagttccatttcagcaaaaccttccgcaagcttaccggaataaatcctactgcgtaccgccagaaaccgcagatggaagaataatttgcagcaataaaaataagtgcaggtatcagagttaattactctctgacaactacacttttttggtactgaaaagacctgttatcggtttacagaactgattacaggtctttttattctgctgatctttatgcattgctgtttttcctgtacaaagcttaaaaaagtgtacaaatcctttattgatctgtctttgtggcatacataatcccgcttaatatttcttctacgctcgagtatttccttcgagtattgcagatcctgttgtgaaaaatttaatatttgcttatttatattttcattttaaaagaaccttaaaaagaacgacatagctttcgctatgccgccctttatgctttaaaatcacttataaattatttccaggcttcgtcaccgactgcctctgcctgagttgcacgtctctcatcaattgcgttgagaacatcttctgaagtcatgtcgccgataaacatggatacgatatcctgtgtcagctctgtccactgaggattcaggtatttaatagtatcctggaatacagttccctgcttctcagcagaatcgataaactcttttgtttcatcgctgtaggaaggtgtctgaccaacctcgaaaggaaggttctcaatcttgtcacagttgtcaatcatgtactgtacactgtcagcagaagcaatgtactcaaggtactgttttgcttcttcctgatgctcagaaccggaataaataaatctggacggtccaaccggatgtacgttcagaatgtcgttgtcaagaagcggaatcttgaacataccaaagtcttcctctgtgtatgcgccttcggaagctgctgcgattgccggaatctgaccgggtttctcaagagccattgcgtactcgcctgttccaagatacataagaagatctgtgtactcgtcagacaggtagttgtcgccgaaatagcctttctgggccatatcgttcagctggtcaagtgcctgtttcagttcaggaacatctgcaaatttgatcttgttattgttcagatcatctacaatattcggaacaagatcctcatattttccgccgatctcagtgaaccacatggtctgatgccagccgtctgcacatggctcatagattggagttacctcattgtcaagaagtgtctgacatacttcctcaaactctgcaaatgtagtgggaacttccagcttattctcttcaaaaatcttcttgttgtaaattacataataatctgtggaaacgtcgaaataagtcattccgtaaaccttgtcgcctacagaagtctgctcttttgcaaactcatcataggtctctacccatggctgatcggaaagatctactgcgttttcttctacgttatactgggaaacaatatcaaaggctccagcctgtccgccaaagatatccggaccctcaccactgttcagttttgtcatcagcatattgtaatactgatcagccgggacaatctgataatcaatcttgattccggtctcttcctcaaattttttgccaagctccatctccgcgtcatacacccagtcctgacttgccattacagtaatggttgtatcgccctccgcatgaactgtctctgcatatacagtgatagatcctgctgccattgcaccacaaagaagtgcagccactaattttttcttcatcgtaaaaaccctcctgttttcttgatggttttatcataccagcacattcaccaaaagaacatggaaattgcgcagctctttttgtcattttttaacttatctgtgatctcagatgtcagaattttattcatacactgaaatactgcttttccccgaaaaatttatgccatacagattttactttttctcatcccttggcggctttcccacctgttttttgtacagacggtaaaaattggagatattatgaaatccacattccatggcgatttccgtaacacttttgtccgtatctcttaaaagttctctggcgtggctgatacgaatgcgggtcacatattcactgaagctgataccggttaccttcctgaaataagaggaaaaataattggaactcatataagccgctgccgccacttcatccagggtgattttttcactgtaatgatgatctatataggaaatcgcctgctccagacgcttcatggcagactttttttccttcagcatctctcctgatttactttcatcctgataggtgcggatcagcatggtaagtatacgaaggatatttgccttgatcatcagaggatatccctctttctgctgctgccactctgcataaatctccctgattcctttgcggatctcatgacttaccggctcttcacttccgatcctgtttttaaaattacttccccgctctacaaaaggcttcagatattcagagtcaaaaacactgagcttttctgccacaaattccggggaaaaaatcattaccagaagcttcatatcttctcccatcagcttccagccatgggcttccacattattaaaaataataatatcccccggtttcatcatatactcctgtccgttgacagaataatttccctgtccttcctgtacgtaagtgatctcaaaataactgtgccagtgaaaggtatccggtcggctgtttttatgattcagcaccacctctgatatctgaaagggaaaatccttatccagcgcaatattatctctgataagcttcatcttataatgtcctttctgccgctgtgtaatggcgtgattcttcagacattataacaaatgccggttttaagcgcaattattgtcagaaataatcataaaacagacttttaagggattatttataaactattctgttttttctgtgttgacaaattcttcaattttttcaagatactcctggtgttttccatgtactgctatgcgaaaatagttgtttccctctattccttttatcatataataatcattttcaattttgaaaaacggctgtctgagcatatccagatacacaaatccccccagaggtttcagacttaaaataaactccctgtttattttatgatccagaagacagtcccaggcaaaccatccggcttctgcgcacttttctcttgattctgttttttccacaatcttcatttccaatttctcctgatctgtaaacaaagctttttctgataaaaccttcaaaaaactcctgtcagagattctgcaatttcttctgccgcctttataaagcttcgtatttcctcctcggttgtgaaccaggaaacactgacccttacagttccccttgccccggttcccattgcctgatggatcagcggcgaacagtgaagccctgccctgactgttattccataggtatccccaagaatataggcactgtccgacggagaaagccctgtaaaattcatgctcagcaccggacctctgcatgtctccttatttccataaacctgaattccgggaatcctttcaagttcctcatacaaaatctccatcagatttctttcttttttatggattgtctccacacctgtctcaagaataaatcccactccggcataaagggctgtgatcccgggaagattatgggttcccggctcatattcataatcgtcattctcataaacaagttttgcgctgtctgttcctgttcccccaaatttcaacgggatcagcctcagtcccggccgtatataaaagcctcctgttccctgaattcccataaggcttttatgtcctgtaaaaacaagggcatctgctccccatttctctgcatctatgggaatacagcctgcactctgagaaacatctgcaatgaagatcagtccgtgtttttctgcaaatcttcccaccatatccatatcctgaatacacccggtcacattggaacagtgatttactacaattgctctggtccgggaagtcacagaactttccagtgctgccagtgtgatcctgccgtctttttcacagggaatcactttcatttccagtttctgtgctgacagaagatttctgacaggtcgcagaacactgttatgctctgtctgagtaaccagaatctccccatccagcagtaatcctcccagcactgtattcagggcttctgtggcacctgaagtaaaatatatcctggaatactcagaaatacccaaaagcctgcccagacgctctctgcaggcttcttcaatatccttttttccaatctgcattcctccccgaaactgagaagcaggcacgtcttccagacatgcctgcactgcttcttttacacaggatggtttcggatatgaggttgctgcattgttcagatagatcaaacctctccctcctccccggctgattcccgtcagccttccagtatattaaaattcataacttttgcgatttttttcagaatttttctatagtcgccaaacaccagtacctgatgatggccaaagcctgccagattatgcatatactctcttgcgtcatccattttaatataataataaggactgcagtaagtctctgcatactcagaacggatgacttcccctacctttacgcacatggtatcgcctgccggattaaatcgtcccagagttacataatcctcattattctctgtaaaatcaacctgaagcttgccaccgaatccctgaccggtaaatgcccaaagtttatattccagaggtttggttccgtaaccattcatgcacagcgccggaactgcatgatgaatacgaagcagttcatctgtttcatgattgggatttcccataaatgcaggccggtgagctgcatactgcagaatcaccattgccatcagtgcattgagatcctcttcacatccacttggaatcccttcatcttttaaaatagagtggcacatacacggggtaaattttctctgctgcggaatttctgtggtgcaaagctcatggcaggccgtagaaaatgcattacagtcataaatatccatcattttttttgctgccagataatatttgatatcattcaggaaccattctgtatttacctgggtatctgaagaaccattgatgatcttttctgcaattggtcttgcttcttcgtctgtgatctcatccatgtatttaaaaatagatgtaaaaggaagcttcacaacttccaggccataacgctgtcttaaaatctcaggatcacggatcaggctctggatcccaaaagtcggctgagatcctgcagtcagcacaagggctcttgtattctgaactgcttttcttacccagagaatatgcgcgatctcattcacatcctgaagatccatacagacataagcctctattccaagtgaacggcaataagctgcaaaatcaattccctcatttccgttctgccagatgatcaccggtttattataacgttcaagctttgggattctccagcccatgcacagaaaacagtctactttgtcaagatcttctcctatttttgcaaaaagctctttctcaacagtgaaagattcattatagcgaacatccagaggctccagaaattcaacctcatcaatgacctgttttaatccctctacagaacttttaaaaacttcgtctgcagctttggcctctgcttcctcagtcatatcctctctccgtccggctctgcacggtccctcccagaaatgtgtgtgagtaaggcatcccaccagcggtcttacaaccagttttgtttccatagctttctgtttcatttgtctgtttcctctctttttattttataagtttacgttttcctatttctgataaacctattatataaaggaaatatagaattttcgtcctgtatcttgtgatatcactgtacttttttcctgtttttgcaggaaaaagtctaccgatcataaatctgccgatcataatgatctgatccatttatttcttctttaccagcctgacagcccccgtcaccaaaggataaaatattcatcagaacaaaaccgcagcccgggccgtggaacccttttgctgcggtttttctgtgttacagaatatattttattggaattcaaaagtaaactttatttatcttcccagtgactcacagaaagtgcctttgacatcgctccagttcttttctgcataatccagaagatatactgcctgctccatggacatttccgggaacagaaggaagaggctgtgagaaccgtatttttttacaagacggtctacgtttctgatccagtcctcaaactctccggaataaacctttacccagatggattttcctgctgcaatggctttgtcataaatcacatcccagtccggaagagttccgtccgggccggcatcgccgctggtccactgcagagcatcaattccgtcaatttccatcagagcatccatgtgcttgatcgcctgcggtccgtccagatgatagagaacatgatccacattttcagactgtgttctcagtgaaggctggatgtatttccggaaatcctccggtgacatcatggctgagaaatcacactgcagcttcacggttcttcccggtccccagatctggaacacagtgtatgcgttgccgccttcctcatctttgatggcatcgtagaaacagtcataataatcatagtaaacatcagttacttcctgtatacgctcgcctaccttttccggctcatccagaaggtcgaacaaggtttcctgggctccgcgaagggatgccagaacatcaatattctccatcaggtcaggcatatctacataaaaatcatttccagccagttcacggcagcttttcacaagatcgatatgtttcttaaaccatttattttccggatcaaactgaagcttcggaacaccatcccagccgtccagacacttgttaaaccatacggtgtcttctttaaagccgatctcggatccaaggtaggctgccagagatcccggtccaaagtcaacattcaggttcgggaagctctcgccaaggaatgcgtgagtgtcacagaagaaacgataacggtctacgattctctgaggatcctgatatttatcctccatatccttccacatcagctcatccggcatattgtagtatttgccctggcagatctgccccagatatccgccgtctacaggagttccgtcagaatactgttcaatctccggtcttcttgcgatcacgcacatcagcggacggcctgtgttcttgtgagcccagtaattacggaatttctcttttgtttcttcccagttcagcttatagccttctcccggaccgggaagacgtactttgctgatatctacttttgttttgtcaaaattcacctgaactgcagcttcttttacaggcgcagctttctcttttgatgctacttctgttttttctgccgctcttttttcttcaaaagctttcagttcttcctcagtaaggtcaaattctccggctgcggcctttgcacagaaaccggaatccgcatatttttttgcctgctctgctgcagatgccgcatcctcggtatatgcgtctgcgccgatctcatcagcaaactcctgagtgatcggagctcctcctaccataattttaattcttggacggaaaggctgctccagaagagctgcaactgtgtcgcgcagagacggcatggttgtagtaagaagcgcggatagggcaacgatcgttgcatccttatgttcatttactgtatcaataaaggtctggatgggaacgtccacgccaagatcaagaacctcaaatccggcgctctcaaacatcatgcccaccagattttttccgatatcgtgaaggtcgcctgccacagtaccgagaatgatctttcctgcgcttcccgcctctcctgttgcaagatacggcttcagcacctcaacaccggccttcatagcgcgggctgcagccagcatctgcggaacaaagatgatctcttttttgaagttctcacctaccacagccatagctccgatcataccgtcattgagaattgctgtaggatcgcagcctgcgtcaatggcatcctgcacacattttccgatttctttgtttttaccgtcctgagttgccttaaagactgccagcatcttctcgtctgccggtgtctgcggtgccgcttctgcttctgactcctgaggtctgtcctggaatttcccgatataattcaggcagtattcatctctttccagaagagcgtctgtggcatagatcattccgatcatatttttgttggttggatctacgatagcgctatccatacctgcattcatggcaagaaccataaatgcctgattgatattttttcttacaggcagaccaaatgaaatgttggaaagaccgctggtaatatggatttccggatattccgccttaatctgacggcagcagtctgcaaatacagtaagtgcagtctcatctgttgacaaagttactaccaacgggtcaatatgtaatcttgacggagcaattccgtactcttttgccttttccatgattccatggaaaaccttcatcctgcgttctacagaatccgggattccgtcattgtcgcagagaagagcaacacattcccagtctgtatccgcaatgaccgggaaaatcctgtcaattttgtctccttccagggaaacagagtttaccagtcccggtcttttacagaacgggatcgctgctacgcaggattttgcacttggactgtctacacaaatcggcgtatctgttacctcctgtacaagatcaatcatccattttaaagtttctacttccacgtcctcctcaacagaagcacacacgtccagaaatgtggcgcccgcttctgcctgttttctggctctctctttgataagttccgcatccttatctgcaatggccttagcaactgacggaatggaaccgttcagtttttctccaatgattatcatggcataccctcctgtatgttattactgagtttattttaccccaggagagcttgtattttcttctgctatttttctatttatgtgtactattttaattttctcagttacatattacaggcatttaaaagaaatccctctgcactgctgaaattttcaagctttgtaaccagaatatgacatatttttctgactgcaaatgatacaatacagttgctgccgaacctccagcagaaaggaggtgaatgctgatgtcagaacttatcatgacgttttttgtttctgtcgcagcaggtgtagttagctactacatctgcaaatggctggacaaaaacaacaggcagtaacagcctgaaggtctaagccaccttacataaaaggaatagaaaaccccggaagtgtagcagacttccggggttttcgttttcgctaatgtcagaatcataacgtttttagctactatcagtatatgctcctcctgcctgaaagtcaacaaaatctcatcgacaccattcgacaacagtaaccctctgacaatattttattcattttcatctgctgatgatgatacaaaaccattttctgactcttcagattttactgcatcaagataaatctccatcatagcctcctgataggcagctcttttcttctttttcatgcactcccggatttccagaagctcgtctatatatacctgttccagctttttaagccgtctgggattcagttccacttcggacagaaactgcagataccattttttatcatatttccagagatgaatactttcaccatatcgttctttcagcctctgagcaatcaggataccttccgggtcaaaatcccctgcataaaagaatctgtgactgcccttcaggctgtccagcagaagcagagcggcaagccttggctgtccattgatacacacagccgcacattccggatatcgggctgtcagaacagaaaatactgccggattttctactacataaacctgtttccgctgcgccctgataacctcaatactgcccatggtgtgcagcgtcagacgcatgggttccttctcaagaaaaaatccttctattcccctgtgaagacttccatctcttttccagccccggataccataagccagaacctcattagacaaatcgtctctcaaaagcccgcactgataaaaaaggcggttcttttcctctgcacctgtcattttctctgagtctgtgtccgacaactgccatgaaaaaaatgcagtcagtaatttttcggcagcagtacctgcgtcaaaataatgaggattgcctgtgacctttgcagaaaatacaggaagcagttctctgcagccgtttccttctctaaacatttctgtaagtctctgaactgcagccataaaattctccagcacactgcgaaatgtctccggatcacctccatactgctgaatcagaatttcataacctggaaggtgatttgccagaaccagcttcagccatacagaagccgtatttccctgagatttttttataatatcattgaaataaaaagctcttttttccagttccttctgtttttcttctttttttattaccaatggctgttcaaaatatgctttcagcagctcttctcccgaaattcctgcaaaacggctgttctgaagccttttttcaaacacctgcgcagaaattgtcacagtcctgctttctgtataatccttttgaaaaaagccactgagctgagccttctcctcctgatccaatccggtcagcgttatcttaccgcccagatatcccagtccggcatatttctctcgccattttgagaaaaactttttataaaccggacgctcacgaaaatattccagacattccttcaggtttttatttttctctccttctgtcatttcctatgacctctgttccgtacttcctgttgtcatgatctttttctttccattccagatatagcggatcacagaaacaaactttgcattttccggtcggatcagctgataaattgccagtcccggaaccgtatcataatcgccccacaaaatctgagaattgatcataaaattaaattcaaattccaccatcagacggaacatatcccggatattggtttcatctacaccggcaaaagcctcgtcaagagaaatcagccttggcgcatcctcgttggctcctgcatattttgccaccactgctgaaaataaaggaacatacatggacatggctttttctcctccgctgaaggtaaaaaatactctgtctgtcagctcccgcttcttctctcctgttttctggcactccaattgaaattcaaaccactttctgtagtccagtacctcccgcatagttgcatggaaggactgaactgcgccggtttctcctgaaattttacgggcttcctcaatttttgaccgaaaatgacgggaaaggctctcaacctcttcctccctcataatctccgcatccttctgaagcagctccaccagagatctggtatccagctgatcttctctttgagcctgcttattcttccagcgaagacttaatttcaatccgcttgaggtctgcatggattccataagtgtattcattttttctatccagcgcctgcttgcctggatctttatcctgatttttttactgatcgtgtttgcaagtatatcctcaaacagctcccggtctctttcatttaaaagagcagacaatgattccgcatcttctgtcaatttccggatcagttccttaaaagtcactgatattccccgatattttgccgaaatatcaattcgctttacacttttttcataaaacagactgtcctcatccagatcaccaaacagagacaacagagtaatctgataatccagaagatatccccggttctgatgataaatctcctgaagatttccaaacaggtcgctctgtttcttatttccaaagcctcctgcaaacatcctgcacaccttccgcgcctgatcatccatatcctctgtaattacaaaatttttttccacataccctaaattatattctttctggaaaatatactgatacttttcctgttttttcagaaattcctgtttctttataccgttttccttgattttttcttcaagcgtctggatttcaccttccagggcttcctgttcccttacactgttttcccgttctttcggaagctgcaagagacgcttcatgcagaaatccaggcgttcctgtatctgctcataatccgtaagctccagctgttttctcacagaatccaaaagcccctccaattcccgtattttctgctgaatccgaattctttcataccgtatttcgtccagatcctgttccagctcctccagatacgcttcctgactttccacaaatcggagaccattctgataatttccccataaaacctggagactagccaaaagctccttataatttctcagcccatccagcgtctgtacaaacagctccagacgaggcgttaaatatgcttttgaacaaagctccctgaccttaatccgaatctgatccagattttttctttctttttccgtaatgatctgctgttctcccagctgtcttaccgaaatttccaacttatattcacactctgccagggcctttgccgctgttttcagatcatcctcttttggaaactccaaccattctctctgaagcctgttccttctttcttcattttgcactatagcttcttccagcatccggatttctttttcttcctgttcacaaaggactgtcagctcttctatcttacttttcctgtattcttcccgtgcacgggcaccaataaaacgcgctttatactcctttgtaaccgtaccctccagcactccaatccggtaatttccctctctgtcaatccaggaatgaccgctctgctcctcccggcttccaaatcctattgctgaaagaatattggagatgctatgatataaaagaatatcctgctctccattatccacgtccaggacctgagtcagattctctttcacatgggaaacgtcactgaaaatatatttgtcgcagacgcctgggtccagagaatacacctgttcccgatattcctctgagataatcagggcatccagaactcccatattcataagagcctcttctatgcggtctgcctgttctctagttaatcctgtgtcaaactctatgattttataaaactgctgatagggtattccctgttccttcagtcttcttcgattttgtcttacacattctggctgctccggttccggatcttttttattattccagctttcaagttctgcatttaattcttcgaaggattcctgtgctttgccatgagcctgttccagttgcagcttttcccggttcaattcactttccttactgaacagaatgccttttacagaatcacggatttccagaaagtcctcccctaattcatactcctgaatttttcgggtcatttccctcagtgcatccggttctggttttaactcctgattttcgtgagcccagatataaattttttctgtcagctctgcctttgtctcctgaaacagtttttcatactgctggactgatctttccgcctgatcccgctgctgctgacagacatccagctctttcaggtatctgtcatatcgatcctgacagtttttttcctccgtaagcccctcttttccttcttccaccttgtctgtatatttttttaataaagcattgtgagatgaaaacgaataagaaggattcctgtcttccagaagttctttccttaaaaaagaaaactcatcaaaggggatatcttccatttcctcttccatttcatccagacagccttccatgtcagcccagatagtttcatttctctcattttcctgtctgagcctttcctttgcatccagatgtttttcttttttctcctgttcctgagcctctttttttctctcttccttccgcttttcatccagatcctgcgtcagctttatttcctgatctttcagctttgccgcatcactttccgcaagagaactgctttcttcttttaataccgtctcctcacatgccagagcttcataatgctgcttctcctgaatcaaaagctcctccctgttcataagactctctgagagctccttttctgttttttcacaatcctcaagatttttcagagcctccgtcagcatcatagccttgtcgtacaagacaatctgattgtactgatcatacaccttttcaatctgtctggcagcatttatgctctcattcaaagaatccagatttgttttcaggctgtccatgttttcaattgcttctgacatagggcgcagatcatcttccgacagagtctgcagagaactgctgaggatttcattgattactgtaggcttaaaatcctttgataatttaggcgtacgaagctggatcagaagctccagaaactccctgtactcctcctgagtctcaaacccaaacagaagacggttcacacaggccgcatattctccctgggtttccattacctttccgccgtcgccaatacgatttttcagttctgcctttgagcaggtaatacggttgtccacatccttatacagaaaaacatcttttccaacccgtcggttgtctgtaatacagaaataccaggattccagctttttattctttctggcgcggattcccagtccaagggtcatgtattcctcgcttttcatgcgtttaaattccatataaagatagccggtccgttcttcccggtcatcaccctcttccagaagataattttccatttttctagctctggagccaaagggatccagacgttccggtctcatatttccgtccaaaagaagcggaataaagctctgcatggtaacagattttcctgaaccatttgctccccttagcagcatacgaccgtccagaaaatcaaattcttcttcatcataataccagaaatcaatcagtcccaccttgctgatctgccacttactgttattcattctgtcctccctctaatacaaaatctgccggataaactcccatgatctttcctgctgcctgtcttataacaatctcatcctgtttttcttctataagcattaattctttcatatagtcagccatctcccgatagatttctccaaaagtcatttcccgatatgttttattccaggctgctccaaatctctctctgcattcttctgcaagtctctgaaaggcttcccttggaatcctgatctgctcatcaagaggaacctgaatttctcctgtctgaagcttttcctgcagaattcggttaaacagaagaacaatatctgacaaggtattttcctccggaaaacatctgccaagatggctgttttcattcagaatcaaaaacgcactgtttctgtgaacctgaagctcgcagtcaaacagctcggagagttctccctgtatcatatttctgtaatttctcacataggcgaaatcttcttctgaatctgaatccttatacatgcccatagacatcaaaagtctccggtaaactctctgtctccgcacaattcccctgtcctcattgacgtcgatccactcttccttttcaaagtcctccggtgaatggtagcccataatatcctgagtgaaatttttcataaaatatctggaagcacctgtattttcatacagaacctctcctgtatagtcccgggcaaatccctcttcgcttccatcgtctatattcagaagcccacaggcagtacagtatttcatcaccttgatcatatgacggcggtaccgataaaccgtccagtcaatctgctccccttcatactgactctgtacatactctgtaagctcagacagcacaaactgttcttctgcttccttctcctccagaaacataaggacaaggcaaaaaaacacatactccacaggctctttaaagtccaaaatccccatccagttttccggcacagcaggcattttttccaccttaatcaaatagggatttacaatcacctgataccccagcttttctctcaaaaatttcttttcctcaccggaagccagcttctcttttacctgataataaagttcccgatctctcgacttcaggatccatctccggttcagcaaaatctccagtacattcatcttagtccttctcttcctcaaatatcatggtataggcaggcatctgaaaagtgccgtccgtacaattcagagtacagtattcctgcacatccgcctgttcaatgtaataaatctggccttcttccgtctttgccctgtgatccttcctttccagtgcttttgacagccataaaagaaaaatatctcttacctgaggctcaatttccggaagagaggcaaactccagacaattatctttaatatagcttttcagcagttttctttcctgctccagtctttttatttctgacgcacgcatttcttctttttcttttgaatgatcacgaattcctgttctctttgccttttcccgataggtacggattcttggagtcagtgtaatcacaccgggagcttcttcgtatacgccgctgttaatgctgtctgtttctctttgtaaattcccttttaaatgaaaaggcttctctatgccaaatacaacagcagccagtctgtgggcctgctgaatatccctgcactcatgaaaaatacgggctacttttttgtattcttccctgcggttggagccctgactgctcatctcactgattcgcgcagcatatctggtgattttacggataatttcatttgtggtatcaaataccttcccagcctcagactccgccccgtcttttccggaaaaccattccacgatactctcccagcgaccctgattcttatcaaaaatcatctgctcatctatctcaacatccatccggggaatagaaagctcataggccgtagctttttccaaaatctgatgcacagtttctctgtccatattccgaagcttctgttcaattgcagatacgtttgcctgaagcccttttacaaatgaccgcagatactcgatcagcctgtccttaaacagaagaaattccctggtcttcatcatttcctctgctttaacactgttcagttcacgcatatagtcctgataattctgattcagacggataaaatcattattcagatcattccaccatccataaagcttttcctcattccgggaagccatttcttccattttctcaagactgatccgcagtctctccaacagagttggttccagagaagaaccttcaataaacaggttttccacccgtattaccattcgttctacttctactgctgtctctgaaagctgataacgaaattttttatttttgaactcctcaatactgctgacctttctggtatcctgaattgttaccaggtttccccatgatgccaaagccgccagatcctgctgacactgtatcattgtatattctgcaaaagaaggatcctctttcagctcttcgaatacctcctcctgatacagccagtatttcagtttttcgtattttaaataaaaaagccggatgaccgggcgatatctttctgtgttttctacattcagatattttgcctccatcatcggctttctcattttttcctgaattttcattatattttcctcgggtgtgtcatttcaattttcccacttttgttacctttttatgatagcatacagacaacagaggttcaagaatttttctaaaatcctttttcatataatctcagtttggatactgctaaaaaccagcgcttccttgacaattcctgttgcttttcagtataatttagtgtagtaaactacaagagaattaaactaataaacaagcgaggttttacatatgagcgccacttcctcaaaaacacttctcacagaaggacctatctggaaaaggatgactgcttttgccattcctatttttctgggcaatctttttcagcagctttacaatactgctgattctctgatcgtaggaaattttctgggcagcaatgccctggccgctgtcagttcctccggaagtcttatttttcttctggtaggattttttaatggaatcgccattggagccggagtagtaattgcccgttactttggggcaagacagacaaaggatctgcagaaagccatccacaccaccataggctttgggctgatctcaggggttctcctgacgattctgggtattcttcttgcgccaaaaatcctggttctgatgaagactcccacagacgtactccccaattccatccggtatttccgtatctatttcctgggttctgtggcttttgtcctctataataattttgtgggtatcctgcagtctgtaggcgacagcaaacatcctctgtattatctgatattttcctcactggtaaatatctgcctggatcttttatttgtaggtgttttacacatgggtgtaggatctgccgcagctgccacgatcatttcccagtttgtcagtgccttcctctgcctgaaccgcctgacaaggaaaagtccggaggaataccaggtatctcttggtaaaatccagctggatcccgccatgctccgccaaatcatttccaacggacttccggcaggcattcagaattccattatttctctggcaaatgtggttgtccagtctaatatcaacagctttggcaaactggcagtagccggatgcggctcctattccaaggtagaagggtttggttttcttccgatcacctgcttttctatgtctctgactacctttatcagccagaatcttggggccaaaaagtatgacagagcaaaaaaaggcgcccgcttcggtattatctgcagtcttattatggcagagtgcataggaatcatcatttattttgcctcccctgtgctgattgcagcctttaacagtgatccggatgtggtagcctttggagtacaacaggctcgtacagtgactctgttctatttcctgctggcattttctcattgtctggcaggccttctccggggagccggaaaatccatcatccccatgtttgtcatgatgatctgctggtgtatcatccgggtaagctatattaccattatcgtaaagctgatcccctctatccaggtaatcttctgggcttatcctctgacctggacactaagctccattgtatttctgattttttatctgaaatcagactggctgcattttaattcccgtgggtaaaaagcagctgccgcacgaatatttcgtacagcagctgctttttcaaaccattcttctgcgacacgcacgtttcttaaagtaactgctgcctgtcccaagtacacataaaagaactatatatatccccattgcagcggtgaccatctgtttctccggcatccgaagcagcatttccggaagaagcagggaccagatatttgcacccatatgaagcagaacacttgcccacaggcttcctgtgatctccaggaaatacgcaaatacaaatcccaggattcctgcataaacagcctgggtaagattcatgtgataaacaccaaaaaatactcctgatatcactgccgccgttgccaccctggtataatctctcagcctcaggtagatcagccagcgaaaaacaatctcctctgcaagcggcgcgatcactcccatccagaagatgagcataaacaagctttttccatttgtgatctgtgccatattttcctgatattcctgtacattcagaacattttgcagcaaagccaccagcatattggcaaatgtggcaagtgacgctcccagcagaagtaaaaggattccttctccaggcttcagcttctttcccggctgctccggaatcactcccctggcaattcttgcacctttatccttctgataaaaccagatacagggaaccattgtcagaagcgcggtaattcctgtcatcaaaatagtctgagactgataaaattccagtccgtatcccattctgtaacaaattactgccagagctgcataccctacgatctgactgataagaaaatggattccgcaggggtagagtaccctccacactttttttaaaatactctgtttatgcagaggggtcagcagaaaaaatcaacaattccctgtacggaatctacaatttttaagggctgagcctgtttcagctcctgctccgtaccgtatccataggccactgcaacacattcaatcccggcctttctggctccgaacacatcatgctccttgtcccctaccatgataacttcatcccgatgctcctgcatattcagacggttaagaacttcctcgatcacctctgccttgccagttctttttccgctcatttcacttcccacaatctcgctgaaatatccggtcagtccgaaatgatccaggattttttttacaaaatactccggcttagaggaagcgactgcaagaatatatccttttccacacaatgtatccaacatttcctccactccaggataaggctgattttcgaaaattccaactgtagaatatcgctctctgtaatattctactgcttttattccggtttcctcatccagtccggcatactccataaactgctgcaaaagaggcggccctacaaacacctccagctttttcagatcatcctcaggttttcccagtttctccagtgcatactgtacagattttgtgattccttccccggattctgtcagcgtgccatccagatcaaataaaattactttatacatatgcgcctccgattttcagaatttttatttactgctataaatgagcaaatatcgaattttgcataatagaatccgtaatatacgcacataaaagaaagattaagctctatatatgcatcttataaagataaattcatgatgattttgcgcactttttcaaatttactcatttatagtttactgattatcggatagtatatcatgattttcccggaacgtccacgtaaattccggcttccattccgttataagaaagaaacgccagctctgtctgaaataccttttctgatgccttctgttcctctggaatctccggataaatcctgttttcctcctgaatccatgctgtttcctttccatttactctcaatgacaaaatctgaacgttcccgttccgttttatattcagaaccggctctgacgtcgtttttattgtgcctttccagtaaagaacttccggtaccgcatgcagctgattccggaaactttccggttccttatctctgtcatctttttctgttttctctgcctgatataaatctgcccccatgtctgacgcaatatcagcggaagcggttggagaaactgtttccactggctgctgcgtcctgcaaggcggcatgttctggaaaccttctgttcctgtccggtccgactcccctgtcttggacagattttcctgcagctcttccgcttcactctgattccttatttcctccaaatattccgtatctgtttcttccatattttccatgctgttttcccagtcagacacgcccccgctttcgggcacagtttccggctcttcataaatctccccctgccagctttcttctcctgacccaaacatatcctcatatccattttcctcagactgctgttgttccccaaaatcctggtccccgtctcccacttcccagtcagagggaatacctgtgctttctcccggaagcgtctccacatgaaaccctccaagatcctgagcagcgcttgtctgtctaattgctgttacaagtacaagaactgagattactgacagaaactttctgtttcccgagaaatcagccagatatttttccccgacatgttcttttttccttaggatatgtctttttctctttagcgtatatttattcttcattctatttgagatcatatttcgtttcctctccttttaatacggataattgtttcagatattctttccagtgttctacgtcttttgcgtaatcagaatcactttttaaatcttttctgtttttcatcagcttatataattccacgctttctgtttcccttccctgcctgatcagaaataacccgtacagagagtattctttatttcctgccttttcccggagcatctgtctgtaatacccttctgcctttgccatatttccttccagttcactgttctgagcaagaagtgtaagcacttgctgctgttgctccaaagcatcataaatcctcagaaatctctgcccggatttttctatctgacctgtgattatttttctgataccattcccgcctgaccgaaaatccatggaataataccaggcagtaaccggagatatagcagtttccaattcctgcatttccagtctttgcattgtttctgttgtcagcgtccccattatgactgcagtacaaagaaagcaacacagtccgacagccgctcccttccatactttccaggacagaggttttattttctgcaatgcattttctgcttcctctgctgatctccagcgtttttccggctgactgaagcagcattttctgataaaaaatccaagccccggaaactgaaaaaaatattgaagcctgcgcttctggcacagctcatctacagtttttcccaaagcataaaagtcactggcaggaacaatcctcccctgatactgctccggagccgcatacccctctgttcccagacaataaaagctctgtctttcatatcccaaaactgcgcttccaaagtcaaccagataaagccttcctgattccgtcagcatcagattgtccggcttcaaatctccgtaataaaccgccggctttctggaatgcagatatttcagaatttgcagcaccgtacctgcaatggacagaatctcctctccggaaaatattcttccctcgttcagatactgtcccagagattttcccctgatatactccattacaagataacaatgatcattctgttctgtataatcaatcatcttcggaagagaaggatgctccaaaagccgaaaaagccctgcctcacgttttttctcagcaggaagttcctttaccgcccggtatatgccaagctccagatctcttgcaagataaagatccccctctccacccctgccgatcctttccataatacaataacgcccttttaaaataattccggttaattcgatacgatctcctcctctttccatgcgcacaaattacatgtctgatcttttcatatatcttaatgaacaactttgaaaaagtgcacaaaaatactcacgaatctgtctttataacatacacatatacagcctgatctttcttttatgtccgtatattacggattctattgtgtagaatttgatatttactcatttataaaaaataaaatgggaacttaccggatgaactccggaaaaagaaatgttgatgtttgtattatagcacaaattgttcttttcaattcttaaatttctataaaacatacaccaaaactccagtcagtgaaatgttatcactgaccggagaaatgattgtacctgattttttacagaaacagccggacatcagcaggattcattccccgccttatagtattccggaattttttacttttcttgatcagacagatatttccctttcaatatccattaaataaattcttgcattcagatgatggggatcaagttttaaggtatctttgaaatactgagctgccttttccatatttttcagccccagatttccaagccccataaggtaatagcagtgagcctgattctttctggtaagatcctcctcaaaaatctgaagatccggataggatactgcaaagtaatccatttttacttcatcataaatatgagcctctccataactgatcagcttctggaaccttgattttgagggtgtgctttttttcagtttttccagagccattccctgatacatgatcatatctgcaggctggtcatagtagaacatcattcccgcaggttcatctgttcctgttgttgctttttccagaagttcctctgcgcatgcctccttaccaagagccgcctttgccacagccagataataattgatatggttgtcctttgttccctcaagctttccttctcccagattctccggataaacaagggctttttccaaaagctcttctgcttcctcgtaatttttctctgcaagggctcttttcgccattcctacaagagctgtcgtatactgagtggttgcttttccttctccgccttcccacggatggaattttcttcccataagcagttcatatgctttttcatgctcacccacaaagtttttcatggtaatatattcaataaatacatcgtcccgtttcacaaacgcatctgcatgcttctcataaaaagcaattctgtcctctgttgacatgcccagttttttgtataactggtccagttcaagaaacactctggcatctgaggtatcaagggcaaaggctttttccagtacctcgcgggccttctccggttcatttgatttattgtaataaacaagagcaaggtttctgaatacagtcggatactgtggatccagtttggctgccatttcccagttttcctttgcttctttatactggcgtttgtcataccaaatgtttccaagataatagtaagctttcgggcattcaggctgatcttccactgccattttaagaacattgatgtcttccaggcggttggggaagcagtaagacggatccgctttatctgcaagacgaaacatttccgcagccttttcctcttctcccagttttttcagcgctgccccgcgatagtaataaagcataggccactgtacatcgcagatattcagaagatccagcgcctcctgccagaagccgtcttccatatagtcaatggctgcctgaataaagttctggtggaagtttctcatttttgctttcagaagctgttttctgttattctgttcttccggctgtgacaaaagaatttcctcataggaagatacaaaatcaaagcagtctatttcaagattttctgcgatccatttttctgcctgttctgtgcatcccagttttcgaagaattgatgccttcagccctcttgccttaatgttatgactgtttttgaccagtcctttttccacaagttccagcgcagaaagatagtcttttttcatggatgcaatggctgccaggaaatagaatgacatttcctgctgctcatttgtccatgttgctttaaagaacgcatcataggcttcctcatatcttccctgatagaaaagtgtaagtcccaggtcataatatgcttcactgttatacggatttggatttttccaggtcatgcgttccaacgcttttcggaaatatgcttcactttctttcagctgtccccgtctgaacagaagcattccataagcagtattcagacggatgtctcctgcatcccttttcagtccctccagatagtacggatccggaagataggttgcatgtctgtactgttcaatatgctgacctgtcagatacagttcttcgcaggtaaggatctcttccggagcctttgccgcctcagcaggtttcggaagctccggtatattttcttccagaggtgtaaattctaccagaactcttccctgtgcatttaaaacacggacagtcagttctgttttatcttctgtctcaacagaaagctctttttcataaattctgacaggagaaatatcggctgtatcgcagaaaatttcttctccccttctttccagtacaattcgggcatctttttcttctcctgttgtataaacacagagagatacctttccattttcaacctccatattgaccatggcgtcaatggaagcattttttacatatcccacttttttataaggcataaaatactgtttgaaggtcttttcctcaaatggcttcagccaggtaaaatccggctggttatctgtgtaaactcctgtcataagctcaatgtacggaccatcctcatctgtaagattgcggtcccatgcttttccaaaatcaccgcagccccaagtccactgtttttttccaggggaaatatgatgatctgccacatgaagaataccggcttcttttccgtagtcatagcctcccacaaaatcaaactctgacttttccgccatgtaggaagtcggcaccgggatatttttatatctggaaatatctacaccttcactgtagtcatgtttataataaactccagtggcaatcgggaatttcgatacgtctctcttgccatgatccatcactgcatggacatccggcggaaatacagactgtgtattgtcatttaccggaactgccggatttgcccaccaaaggaaagtctgaggcatcggagtccggttgtaaagctgtccacggatttcaatataggccttgtccggataaagcgtaaaggatgcaattccctttgttccgtacatctggtccacatcattgaccataacagtcctgcttccgtcctcgtgctcagaaactgcataatctacagggagatatgtagtcggtctgtgatgctgcggccagttaaactcaataccgccggagatccagggtccggtgagtcccaccagagccggtttgatcacatgattgtagtatacaaaatcataatcatttgttttgtcataggctcttaaaatccttcctccaagctggggcaggattgtaacacgaatatactgattctccaggatcacagccttccatgctttgtcaatcttttcgtcccggatcttttctgtaacaggatacggataaactcttcctgaacttccctgataaacacgtttttcagaaaaaataggatttttttctgcttctcctatttcatatgttggaagaatcaactcttcttcccaaacctttacctcgttcatagttacctcccatacatttttattgctttgactttatgtttttgatattataattataccagtctttttcctgtgaatcattcatttaacttgctttaaagtttcaaaaaattgctctataatcttataaaataaaaagcagaaaggtgatcaccatgcgttcaaaagaagcgaaagtaaaagaacactctcactattatctctatcagcccagcgctacggcttccaggctttatctttatcccatagctcttggatattttgaatacgagaccggatactctctctggcggaacagctacgacagttttcttcttatgtatctgatcaaaggttcctgcctgatccagtatcagaatgaagaacttcgggtctcttccggaaattttatccttctggactgctatcagcctcatggatatcgttttgatgaagattcggatgtcctctggcttcattttgacggtcctcttgcccgttcctactatgagctgctctctgttcagggaattgttttttccccctccaatccgtctccggttatccacaatatggaaaaacttgttgaccttttcaaaaaagcaatgcccattaaagagtatatggtatcagaccgcattacccagattctcaatgcgctcctgaattcccgttctcaggcaaaaaccaccttttcccattctgaggtaattgaaaattctctgatctacatcagcaagcatttcagcgaacatctgaccatggagacactggctgccaattccaatatgagcctgtttcattttacccggatcttttctgccgaaaccggctatactccatatcagtatctcattgcaacacggatcaattccgccaagtatcttttgcgcacaccggatctccccataaaggatatcgctttttcctccggtttcagcagtgaaagcagtttctgctccacctttaaaaagtgggagcatatgactcccagccagttccgttccagtattttttcagattcttctctttaagcataaaaaaccgacggcaaagaccataatgagtctcagtcatcggttttttcttatctggtataatattcctttacggcgtcaaagaatgcctgaatattttcaagaggtgcagccggaggaatatcgcatccgctggagatcacaaagttcggatactttccgcatcgatttaaaagctccagcgtctctttcctgattttttccggcgtgccgctgcgaatcgttcctgcaggatcgatgttgccgatcactacacggtcttctggaatcactttcagaactttttccacatcaaccgcatttccaatactgtatgcctgcatatccaatgcccggatacgatccagaagaggagaaatatttccacaattgtgatacataaaaataaagttttcatcttccactgcttcccttaccttctgtacatagggagtagaaaattcatccatcagcgtgggagacaaaagtcccgccgccggttctgccatacagattccattggctcccgcttctttaaatgcctttgcatactggattaaaaaagcagttgctttttccagtatcatttctaccatttccggttcgtcaaagcagagaagcataatttctgacatatccagaagtcttcccgcaagagaatatggtccgatgattccggcaagaaccggtttattcctgattctttcacatgctttgcggattccttccacacattctccggtccttcctgcccctacttcaggaatcttcagtgcttccgcttccgcttcatcatggatcaggatcccatgaactgtaggtacatcgtcttcgctgtagcataccggcgcgccaaaagcctctgcctccacagacagatccataaggctgaatgccgcacctgtgtcaaagcgttccgaaacagcctgcacacattgtgcctgcagttctccacttcttaccagctggtctactgtatgtccaatgatctgaacacccgggaaagaaagtatcggcatggccttcttttctggtgcatgaatatagtcataagcccattgcttcatatttctcttcataataattgcccccattacctggattttctcttttatttactctctactgctttttttgccacctctgctgctgacgctgcatccggtgtataataatccgcaccgatctcttctgcaaattcgttggtgatcggcgctcccccaatcataacaatatacttgtcacgaaggttcttttctttcagaagatcaatgacctctttcatctgtgacatcgttgtggataaaagggcggacagtccgataatatccgcattgacttcttctgctttttccagaaatgcctctgcgctgacgtcaactcccatatcatagatttcaaaaccggctcccttcaaaagcatggcagtaagattctttccgatatcgtgaagatctccctgtacagtaccaatcaccactcgtccaatcggctcatttcccgcttccaccagctttggttccagaatactcagacccacattcatagcccgggccgccatcatgacgtccggtacaaaaacttcctctcttttaaattttccgccaatgatgctcattcctgacatcaggccttccttcaggattattttgggatcaattccctcttccagtgcctgttcgatcagagcctttacgttttttcttttccctttctgtaaaaactcggatatttcttctaaaattgacatgctgctcctcctttatctattactgtttaagacctgcgatatgtccggcatgcttctacataagccagtatgttttcaagaggcacttccggttccagcatatgtgtaggcgctacaaaaagcccgcctttttcccctgcgatatccaggtttttccacacagcttctttcacttcttccggtgtgcctttcggcattactgtctgtgttccgatggttccatggaaagagattttatctccgtatttctgataaatttccccaaaatccatacactcactctgaatcggattcagcacatctacacctgcttcgataagatgaggaatcataggctctataaatccgcaggaatgataaaaaataatgatctccggattaatccgctttacttcatcaatgatttttttcagtcttggcttgatccaccggcagtacagttcttcgctcatcatgatggtatgctgcattccgatatcatcgcccagaaacagaacatccacgcctgcattcgcgtaggcttttgcacgtatcagtgacagctctgttaccttatcaaaaaggaattccgcaatctcattttcgtcacccatatcacagaacaattcttccatacttctcatgtaccaggcacattcccatatcgtcatctgcatatcgcccaaagccacaagatcctgttctttgatttttttcacctgctctggctgatgagatccgtctgcatgtgcataatccgggaagggatattccataacctcttccagagtttccatatcttccagcggatggcgcatataagtcatatgcatgctgttgggtgatttttcatgtcctactccccagagatcaatatccgctccttccgccagcggtctttcataaaatttcctgaatttctccacatcctggtctgcaagtttcaggtcgtccactctgcgccatggaaatccaaagtattcctcataatcctctgctcccagtttctctttacacagcttctgtaaatgtggacaaagtacaaattctacaggtacatgttcgtagccctgtctgcgcagcagcgacagaaaattctcccggtttgtcatttcttttcctccttgatctgattctttttttcaggttcagagctttgtcctggaaagccctttcggttcctgttttttccataaatttctgtattccataggagccatatgttcatgcttctgaaatactctgcaaaaatactgcgaactgccaaatcctgtatccatggcaatctctgtaaccgatttggttgtaaaccacaaaagttcctttgcctttccaagccgcagggtacagatgtattgctgacagctcattcctgtttcctgctgaaaacatttgcggatgtaacgggaactgatttcaaatctttcagcgatctcttcaatacagatatcgtttctccagttctcgttgatgtactgaatgattttatcaattttttctatttttccttttttctgagatcccctgtcagcacagccgattttttcggaaagttcaataaaaagctgaaaataccccagctgcaccagcatttctctgtttgcattatctttttcatatcgccggatcctgcaaaggctttccatatattcgcatacatcctcgcaccctcgaagccggatataggaactgtccatatgaaaaaagcacatttcctttgccttctcaggaagattgaccacctcaaattccagctgtgtgattctgcagttttctttatcctccacaataaacaaatgctttactcctgcatatacaatgatgcagtcacctcgcttcagtggaacaaaaacgccttccactcccatgatgcaggatccgctgtttatataattgatctcaatttcacagtgtgtatgggcttcgtaccgataggcggctggaaaccggaatactcctgcacttctggtacggatatcaaacgaatcactgacaaccattgataaaatactttcttttatcctgttcatatgttcctccggatatgttattctcttttttctattttaacataattcggaatttttttttattagtctgattctttttcagtgtatttcttttccctgttatacattgattttaacaccagaaatataatattactttctcttaacggtatttaccggtttattatttgtacatttcggaacacagttttgtcaaaaagaaaactgtgccggagattcccccggcacagccttctttatttcttatgatctgccctgcggtctgtctctttattccgcgtagcttcccatttcttctttgtagttttccggtgttacaacaactgcgtcaactgcggtttccatctccggctcattgccttcgatcatatcaagaagaacttctacagagcctgctccaacctgatctgcggagaagtatgcagatgctttcacacaggtaccgtctgcacctttgttgttccactcatcttttgccatataagcgccaaggcctactacacatgcatctgcatcaagtcctgcactctccagcgcacgtgccgcaccaatacatccttcttcgttggcgcctgttaccagccatgtcttgatctgtggatttgctgtgataactgctgctgcagcggtatttcctttatcagttgttccgtcatagtctgctttaaatacgtttgcctccgggaaatccgggcacagctctgtaaatttatcaagctcgccttctgcacgaggaacacagctggaaaccgtatccatagtcataagaagaagtcctacatcctcttttcctacaagttcattttcatttgcatagtttgccagccattcgccgtttgcagcgccaatgttataagcgtcgattcctacccatggagcaagcttatttccttctgcatcctgaagagcatcatctgctgctacgatcgggattccagcttcttctgctttgtcaatcgctgcctgagacattgtctggtccggaatacaggttacgataccggaagccttgtttgcaatggcattgtcaatcgctttcaggtattcttccggattcatctttgcatctacatatacaaattctccgcctgcttcttcgactgccttctgagctgctgcaccctcgtcgataaaccatgtctgatcgccggctttatagataccataaaccaccagtttatcctcagcgcttacagtcactgcacctcctgccagaacacctgctgtcattgctgcacataatgccacgctcaccatttttcgtttcatgtttgttcctccttgcgttttttcatttttatttccatcacacagttcgtgtgaaagagttccatttcttatttcacattcctcatgcttgcttccagaagttctttttctcttctctgcttacggatatagtcggatgtaagagcgaacagaagaagggctcctcttgccacatactgccagaaagtaggcacgtttaccataataagtcctgtgttgaacgcctggatcagaattactccgagtactgtaccaaacatacttcccacgccgccggcaaatgaaacaccgccaagaataactgcagtaatagcgtcaaactccaggttgatattggctgccggctgacctgaattcatacgggctgcaaaaataatgccgcctaaagaggtcagaacaccaatcaatataaagcacagtgtaatgattctctgtgggttcagtccggcaagacgtgcggcttctgaactgccgccaatggcatatacgcttcttccgaattttgttcttgcaagaataaatccaaaaatcacaaatgccagaatcatcagccacacagtaagaggaagtcccagaaatcttgcttttccaagagcaataaaggttttattactgatggcaatgggttttccatcacagatgatataggcaaagcctctgatcacagactgggttaccaaggtggcgataaaggcttccagtttaatcttatttaccatccaggcattgaaaagtcctacggcaacacctgcaagtaaagtaattacaatagaaactcctgcaggcatcccaaaggaaagaaggagagcagccagagttccgctgaacgctgccagagagcctggtgacaagtcgttctgtcctgcaataatcagatatgtatgtcctacggcaacaattcctaccagggatgccgctacaagaaggttcaccatattctgccaggtaaggaaattcctgttcagacaggtaaacaatgcaaatactactacaattgctgccagcagaatcagtttatctccgccgatcagatttaacagtttatgttcttttttattcttctggttgctcatgtgtatcctcccccatcattccaagctgcagcagccggtcttccgttgcctcttctctcattacctcaccggaaatcctcaaagatttcataacaatgatcctgtctgaaagtccgataacctccggaagttccgatgaaatcaggatcacgccaagcccctgttttgcaaactgacagatcatattataaaattccgattttgcacctacgtcaattcccttggtcggttcatccagtatcagtaccttgggatttgtggcaattccccgggcaacaatgcacttctgctgatttccgccagaaagctctactatttttttgtccggagacggtgtcttaaccttgaaatcacgaatccccttatctgccgcttcgttttcttttacaggatttatgatccctaaccgattggcattctgatccatcagtgcaatgttgatgtttccgctgacacttaaattgctcaggattccctgcattttccggtcttccggaaccaggacgataccattgtccatggcttccttaggagaacggttttcgatttttttgccctccaggaatatttctcctgttttcctcttgtctgcgccaataattgcccgcatcacttctgtacggcctgcacctaccagaccggaaaatcccagaacctctcctttatgaagagtaaaggatacttcttttacatagtcagaagaaacgtttctgacatcaagaagaacatctccgatttccttttcacgatccagattattaaaaatatctcccaggtcacggccaaccatcattttgatcagctgctgctccggcacttcttttgtcactaccgtatctatgtaatgtccgtccttaaaaatcgccaccttgtccgcaatctgttggatttccttcatacgatgggatacataaataatgatctttccctgttctttcagcttctggatcacttcaaacagacagtcgatctccgcgtcgctgagacttgccgtaggctcgtcaaagcagattactttcaggttttccctgctgtatgctttcatgatctccaccatctgctgataggcaatgctcagatcctttaccttggtggtcggctggatcggaagtccaaaatcccggatgatctccgcagccatcttattcgccttgcctgtatcgatcacgccaaacctgtttgacggcatacgtcccagataaatattttctgccacactcagttccagaagaatctgtctctcctgatagatcacgctgatcccttcctgaattgcctcatgaggagagtggaaatgtttctggactccgtccagcaggtattctccctttgtaggctgataatcaccgttcagcaccttcaaaagtgtggattttccggctccgttctcacctaaaaatgccaggacctcaccgccatatgctttaaagcagatattgtccaatgcctttacacccgggaaatacttggagatacctttaaattccaatacactgttcatatctctttcctcccttgcttttctctgatattgattataaccttcctctttttctttttcattagcttaaattgctatggagtttcaaattcttgctattttatacatatttacggatttctcgcaagttatttcttccatactcgttattatacacaaataccaaactatcttcttatgtgtttcggaaataccgccaatatttattacataattcggaatttttgttttctgttcttaagcattttgcacattcctccttgattttgaatcgaaattacgttatatttagtgaaaaaacaaggagtatttatcatgaagattacttttttgcaccggtctgcacaatatacgctcttatctctcacctgcaaagattcttttcaggtaacgcttaattccatcggcgcttctgtccgttccgtcggatatacagattccgcagataaatttaaaaatattgctttgtcttttgcctctgattctgactataccggaaaccctctgtatgcaggcgctactcttggtccctgtgccggaagaatctccggagggtcgctttccttacctaaaaaaaaatattcccttaccagaaatgaaaagaacaggcattgcctgcatagcggtattcatagtgtttcctttataaactggactcttgtttccatccgggaagaagataccagtgccgaagtgctttttcaatgtactcttccggacggatgtgacggttttccggggaatcggactttttctgtttcttacctgttaaatgaagcccatgagcttacagtcagatatcgtgcggtctctgataaaacaacttattttaatatgagcaatcattcttattttaatttatccgggaattttgaagaaagtgtttatgaccatctgcttcagatccatgcagattcctatatatataatgatgatgaatttatccctgaaggtattgcacctgtagaaaacagtccttttgcttttcgtaagcctgtttctctgactcggcaaatgaaggcttttccggatcatccccagcttacagtcagccgtggatataatcacgcctttcttttaaataaaaacaacgagcttcctcaactggtctttgccagccctgacaacgtccaaaagctttttgtttcttcggatgctccctgcgtaattgtatattccggaggttttatcgaaagcggactctctctttccggaaatcagatttcctgtcccggttgtgctgctgcctttgaatttcaggattatcccgatgctcccggcaatcacggctttccttttcactatacagaagccggaaaagaatggacgagatacatcaaatattcttttgttttttcatgttctagagaaaataaataaaaaaaataatttattaaaaaaatttcaaaaaaacatttgacaactacaattctatatgctatcatatgttttgttgatgagggaaacacctcagagattaatacaggatatgcgatagtggcgtagttggtaacgcgcgaccttgccaaggtcgagaccgcgggttcgagccccgtctatcgctcttgaaaccagaacagatattgttctggtttttttatttccacagaacctcaaaactgccctgcggccagatttcacatccggaccgcagagcagttttttatatatgtatcatggcaaaaattttcattacggaatctgttatcatcccagtgtcataaacgcatatctgagaacaaatacaatggaaataatccatgtgaggaccttcacttctttcgcttttcctgtaaaaagttttatcaggcaatacatgatcaggcctactgcaacaccgtttgcaattgaatatgtaaacggcataaacacaactgtacagaatgcaggaagcgcatttgtcatatcactgaagtccacatccttaatgttgctgagcataagaatacccacaaagatcagagccggaactgttgccgctccagggacaatccccacaaccggggcaaagataatggagccaagaaacagaagagctgtcaccaggctggtcattcccgttcttccccctgcagcaatacctgcgctggattctactactgttgttaccgtggaggttcgaggttcctaccattgctcctgcagcagttgaaatggcatcggacatcagagcttctttcatgtgaatgatttcaccgtctttgtcaatcattcccgactgctttgccgcacccatcaaagttccgattgaatcaaacatgtttacaagagaaacgcttaccaccagcattgccactgtaagacatgtatctacaggattttttcctgagaacatgccgccgaaatccatgttcaggaaagaaacctctgcaaagtcactgaattttgccccaatattcatatcaaatgcagacagtttcgtaacccccagagggattcccgcaattgtagcagccgcaattccaaacaatatggagccttttacattgcgtgaatgaagaactccgattacaatcaatccaatcagcgctaccagcgccccacagatcatagtaacatttccatcctcgcttctccactgcgcaaaatcaaccatgcttaccagagtagacggattacttactaccagtcctgcatttttcagcccgataattgtaataaacagtcctatacccggggtaattgcaagcttcactgcatccggtatcgaacggataatcgcctctctcaatcccactgctgtaatcacaataaagaaaattccagagataaatacgattacaagcgcctcattgtaggaatatcccattcccagcacaaccgtatatgcaaaaaatgcattcagtcccataccaagcgcctgggcaaatggaacctttgcatataacgaacataaaatcgtaccaataaatgcgccgatacaggttccgataaatacaccatttgaaattttttctgccattgccccatcgcccataatcatatacggatctgccaggatctgcggattcaggataagaatatatgcaattgtaataaaagtcgttactcctgcaagtatttcaatccgcatcgtagagccattttttgaaatcccaaaaaaacgttcaaaaaaaccatcctttttttccattactacatagtcctctctttcaaaaaatttctgctgccttgtgtctttgaatatttctgcctgcaacagtcatatcatacgccaaccccggccgcggcttttttgaggctgctctttttctgatctctttatccggatgagaattttcggcaataaaaaaagagagaccacacaagattatgtagtcaactctttacggtagttggtagaaacactgggccaatccccagcatatacataattagcagtgctatattcagctaaaaatattatagcatcctaaatatttttggtctattgataaactacacaattttctcgttgtgttttatgcacttttaccaactattatcatttattctttttattttacatattttatacaaaatcattttatatttttctatgctattttcttgtttttttgttttgacagaatattttccaaaaacagccgattaatgatggaacagtctgattccggtaaatgccattgccatgccatatttatcgcaggttgcaattacatcctcatctcttacagatccgcctggctgagcaatatatttcacgccgctcttatgagccctttcaatattgtcgctgaacgggaagaacgcatcagatcccagagttacatcagtcagctgatccagccactcacgttttgcctctcttgtaaatacttccggcttctcagtaaaaattctctcccatgcgccgtcagcaagcacatccatatattcctcgccaatataaacgtcaatggcattatctctctctgcacggctgattccctctttaaacggaaggttcaaaacctgagggctctgacggaggaaccagttatccgccttctgtccagccagtctggtacagtgtacacgggactgctgtcctgctcctacaccgatagcctgtccgtcctttacaaagcatacagagttggactgagtgtatttcagaacgatcaaagaaattttcagatcacgttttgcctcttcgctgagttctttattttctgtgacaatattggcgattagctcatcgttgatctcaagctcctgtcttccctgctcaaaagttaccccgaacacttccttgtgttccagtggggccggtacaaaatcaggatcgatctcaataacattgtagttgccttttttcttggctttcaggatttccagggcttcctctgtatatcccggagcaatcacgccgtctgaaacctctcttttaataagaagcgctgtatctttgtcacagacatcagaaagggaaataaaatctccaaaggaggacatacggtcagctcctcttgctcttgcataggcgcaggcaattggtgagaactctttccagttcatgtcgtccacccagtagatctttgccagtgtctctgtaagaggaagtcccacagaagcgcctgccggggaaacatgcttaaaggaagttgctgcggcaagtccggttgcttttttcagatctcttacaagctgccagccgttaaaagcgtccaggaaattaatatatccgggttttccggaaagaaccttaataggaagctcacttccgtcattcatatagattctggaaggtttctggtttggattgcatccgtattttaactgtaattcattcattactgcatcctccttatttgttcttatttacaatagttgtttcatatttacctgttgcaatgtcaatatagcgcacgaacagtgaaaccttattttcttcattaagactgttccagagaagatctgtaaactctttcatatcatttggaatctgaaccagcttcggctctccctcaaagcttggaaggggatttccgtcacatttatatgtgtgaataaaccgtccttctcccggaattgctttttcgtaggcaaaggtataacgaagacatgcatccggatttccgttatcgcttttcagaatagacattgcatagctgtaattgccgttttcaatatgcatcacaccggaaatacgaggtgtatagttaggtccgtccggctcaaattcgcggcatcttaaggactgttcaaaggtcatctgtctgtccatgccatcataaatagtatctgtctgatctccgttagtaacaatggtcttgtttccaagaacacgtaccggagcataaatgatcaggcttggatctgtaagcttggacggatcaaatgcctgtgtacggattccctctccttctgtgacaaacacgcggtttctgctgttctcgcttcttcccataataaagtatgctgccactgcttttgttccgtcaagagaacggccgaggatgattcctcttcccggataagaattatttttcagttcattttccagtgatatcatttccatagtctgatctccttttttctaaaaaatcattatataaacgcgctgtcctggcttcatgctgcgttttctgttaaaaataaaacaaaccgcccaggtagtctgtatttcaggctgcccaggcggtcggcttatcacttactgcactccccacaggtaattcctgttttccgccagtcatgcagtcgttattattatcatatcatattttttatttttttcaagaacaaaaattcctgattattcgtctacactgtagttcggagcctcttttgtgatgtggatatcatgaggatgagactcttttaaggaagctgctgaaatcttaataaacttgcctgttgtcttcagcgcttcgatattctcagctccgcaatatcccatacctgcacgaagtccgccgatcaactggtaaacagtgtcttccacatggcccttgtaagctacacgaccctctacgccttccggaacaagcttcttagcatcctgctggaagtaacggtccttgctgccgttctccattgctgcaatggagcccattccacggtataccttgaatttacgtccctgatacagctcaaatgttcccgggctctcgtcacatccggcaaacatgcttcccatcatacatacgttggcgcctgctgcaatggatttggtgatatctccggaatatttgattccgccgtctgcaatgatcggcactccataacgatttgcaacctcatagcagtccataacagctgtgatctgaggaacaccaatacctgcaaccacacgggtagtacagatagaaccaggtccgataccaaccttaactgcgtcaacaccagcctctatcagagccttggtggcagctcctgtggcaacgtttcctgcaattacctgaagatccggatacgcctctttcatttcgcgtacggcccttaaaatattctcagaatgaccgtgagcagaatcaactacgatcacgtctacgcttgcttttacaagagcctcaactcttgcaagaacattggatgtgataccaactgccgcaccgcagagaagacgtccctgctcatcctttgcagccagaggatatttgatctgtttttcaatatccttaatggtgatcaggccttttaagttgaagttatcatctacaatgggtaatttttctttacgggattttgcgaggatcttttttgcttcctccagagtaattccttctttggcagtgatcagaccttcagaagtcatgcactcgccgatctttcttgagaaatctgtctcaaatttcagatctcggttggtaatgatacctaccagtttctttccttctgtgatcggaacaccggaaatacggtattttgccataagatcattggcatctttcagagtatgctctgcggataaataaaatggatctgtaataacgccgttttcagaacgttttaccttatctacctcatctgcctgcgcctcgatagacatatttttgtgaatgataccgataccgccctgtcttgccatagcgatagccatgcggtgctcggtaactgtatccattcccgcgctcataagcggaatgttcagcttcacctttttagtcagccaggttgttacatccacctggttcggaatcacctttgaatacgcaggaactaacagtacatcgtcaaatgtaatgccttcaccgataattgtacccattgtattttttcctcccttgtatgtaatttttacaggatgtgcttattcacacctgcatgatattttgagtttggttcatagtgtagcaaaaaaaaaatacggtgtcaatccaaaaaaactttgctgggcgctgaattttttatagcatttgccatggcatcgtccggctctacgatcaccttacaggcttcgcctccgtcacgaatgatgatgccgaatcttttgtggtccggatttcctgaagaatagtccagaaccttcattttctggttgccgttataataatccattctgtgagaattcagaggagcgatcaggtctgcctctgtaagattcaaagattttactctttttctttttgattttgccatgatcttatcaatatccagttccccgtttacaaacagatattcatactcaagatctgtttttgggataataaaataacatgccacgcccagaccaatggcaacgatcaaaagcagcggattcagaaaaagtcctgctgccacagccactacagtcagtccgatcattccgaatttaatcagggcatccttaaatgtggattcctttttcacaaggaattccgagtacagttcactcataattcactctccttacgagacacggctcgtgcttgtataatgatatttttattctaacataaaaaggaatcagcgtctatgacgccgattcctttttataaaatatttctgttacatcattcccattccaggatttcctgccggcattgcaggagtatcttccttaatggttgcaacaacagactctgttgtcagtaaagtagatgcaacacttgttgcgttctgaagagcgcttcttgtaacctttgcaggatccaggattccggactctaccatgtttacatattcttcattcagagcgtcaaatccaactcccggctcagactctcttactttgttgatgatcacagagccttccagtcctgcatttgcagaaatgtggaataaaggagcctccagagctttcaggataatgtttgcaccagtcttctcatcgccttcaagagtagccgcaagctctgcaaccttcttggatgcatgaatgtatgcagaaccgcctcctgcgatgataccttcctcaacagctgctcttgtagctgcaagagcatcctcaagacggagttttgcctctttcatctctgtctcagttgctgcgcctacacggataactgctacgccgcctgccagttttgcaagtctttcctgtaatttttctttatcaaattcagaggttgtttcctcaatctgtccgcggatctgagcaacacggtcagcaatcgcttttttgtcgccgcagccgtcaacgataacagtattttcttttgcaactttaacggattttgcacgtccaagctgctccatagtagcctctttcagatccagaccaagctcgtcggagattacctgaccgcctgtaaggatagcgatatcctgaagcatttcttttcttctgtcgccatatcccggagccttaacagcaactacctggaaggttcctcttaatttgtttacaataagagttgtaagagcctcgccctctacgtcctctgcgataataagcagttttgcgcctgcctgaacgatctgctccagaagtggaaggatctcctgaatgttgctgatcttcttgtctgtgatcaggatgtacggatcttcaaggtttgcttccattttttccatatctgtggacatgtaagcggaaatatatccacggtcaaactgcataccttctacaaggtcaagctctgtatgcatggtcttggactcttctactgtgataacgccgtctttggaaactttttccatagcgtctgcaacaagctggccaacttcctcgtcacttgcagaaattgcagctacgtttgcaatctgtttctttccgctgattgtctggctcatttcctgaattgcttttactgctgtatcagttgcttttttcattcctttacgaaggatgatcgggtttgctcctgctgcaaggttcttcataccttcatgaaccatagcctgtgccagaacagtagctgttgtagtaccgtcgcctgcaacatcgtttgttttggaagcaacttctttaatcagctgtgctcccatgttctcaaatccgtcctcaagctcgatctcttttgcaatagtcacaccgtcgtttgtgataagcggagcgccgaaagatttgtcaagtacaacgtttcttcctttcggtccaagtgttactcttactgtatttgcaagctggtttacaccattttcaagtgcggctcttgcttctgcaccaaatttgatttcttttgccatgatgaaaattcctcctagtcttttataagatacaaaacttttaaagaaacaccattttcactggtttcgcccttctctgtatggggattcatccagtattcctgtctgtgttttatttaacaactgctaaaatatcgctctgttttacaatgatgtactcttcgccgtcaagcttaacttctgttcctgcatatttggaataaataacctgatctcctgcagcaacttccatttttacttctttgccgtctaccattccgccaggacctactgcaataacttctgcctgctgcggtttttcctgagcctgacccggaagcacgatgccggattttgttgtctcttctgcttctaactgttttaatacaactctgtcacctaaaggtactaatttcatgatctatttcctccttttatttgtcgcaatctgttgctagcactcatttcattcgagtgctaatcactgtccttatattattgaattgcctcccatttcgcaactcttttcacggtcatataaatagatatatacttttattatctcttatttactcttattttcttgttttttcttatcttcttatttttttacaaatctgctgccgtgtctgttccatattctgagttactaactgcccacattgatgtctatggaactgactgcatattgttcagtattcagataccttcaaattttcagacaatttaaagttacagcttctgatttctgttgcccaatgctttatattctgaactatccggatatctcagacaatccatttccggtaaaactgctctgtttccccacagcagaaattcaacaactgtcgaactttcctgtaaggtcagtattttaccctgactcttgacaaagtgcaaaaaaacaggagcttccgctcctgttttataaatatcgtttattcacactgttttatgattttttgtttcgctgtgctttgatctcttccagctcatcaaaaatcacttcattcagaaccttgatataggttcccttcattcctgaagaacgggactcgatcacgcctgcgctctcaaatttacgcagcgcattaacgatcactgatctggtgatccccactctgtctgcaatcttgctggctacaagaataccctcttctccgtccagctcatcgaaaatatggatgatcgcttccagctctgagaaggataaggtattaaatgctgattttactacctgctgctttctgtcttcttctgcattctcttcatggactgcgcgcatcatttccagaccaaccacagttgttccgtattcactgacaataatgtcctcaatatcatatggcttgtcatccctgtacataaacacagttccaaggcgctctccggcaatatcaataggattgatgatgccctgacaccggctgtccacatgctcaaaaccaagtgtctgaagatttacattctcttttgttgataaaactcctaaaaatctttcattcaaaagagtgtctacatgtccgccgactttatcctctatcagctctgtgatctcctgtacacccgggcataagctgacgcccagcaccttgccctttttgctcaacaccagtatattagaacttaaagtctccatcagtacctggcagatatcattaaacactaccttgctggagctgctgttgtgcaaaagtttattgatctttcttgttctgtctaacaactgaacgctcatactggcctccttttctcatctctcctgtattttctacataaatgtcctgatgagtttatattacacgcttttttccaaaattacaagacatttttatgttttttcaattttgcctgcctattctgaaaatatttcctttttaaatttattgtgaaatttttcaatcttcctgctttgttttctgctccacataaccgcaggtctcctggctgcacaccagcttgtttcctttttctaccatatagctgccgcataccggacattttttgtcagacggtttctgccaggacatgaaatcacattccggattatcctcacagccgtaatattttcgtcccttctgcgtttttttcagaacaacatccctgccgcatttcggacatgcaacaccaattttctcataataaggtttggtgtttctgcagtccggaaatcccggacaggcaagaaatcttccatgaggaccatatttgatcaccatattccgcccgcagaggtcacataccacatctgtcacctcatcctggatatctaccttttccagttcctgctccgctgcatccacgtcctttttcagatccgggtagaaattacgcacaacagttttccactgaacggttcctgcttccacacagtccagaaggccttccatcatggctgtaaaatgaacgtccacaatacttggaaatgcctgcttcataatattattcactacctcgcccagctctgtcatatacaggtttttctgctcctttgacacatagcggcggctgatgatggtggtaatggtaggggcataggtacttggacggccaattccctgctcctccagagcctttacaagagaggcctctgtatagtgagccggcggctgggtaaagtgctgttccgatttcagttccagcaattcaagctccatgcctttttccagactctgactgaggacatttcccttcttattgtcatcatcctgcacatacacggacataaagccgtcaaatacaacctttgatgcggcaacggtaaatgtatattcaccggctccgatcttcacagaagtagtctcataacgcgccggcgccattctgcttgcagtaaaacgcttccatataagctgataaagacggaactggtctcttgaaagagattccttcagcattgccggagttcttgaaatatctgtgggacggattgcctcatgggcatcctggatcttctgatccttctttactgcctttccgccctctgccacatagctttctccatactgttctccaatgtatgctcttgccgcctcatcggcctcctgggaaattcttgtagaatccgtacgcagataggtgatgatacctactgtgccatttcccttgatatcaataccctcgtaaagctgctgggcaagacgcatggttttctgagtggaaaagttaagtgtcttggccgcctcctgctgcagtgtactggtggtaaacggaaggggagcgtttttgattctctctcctttttttacttctgtcacctgatattctgcgttttccagctttttcaggatttcgtccatttctgccttattgtgaatcggaagctttttgtctgttccatagaattttgcctgaagaggcttcttttccccatggatcttaaatgcgccgtcaaggctccagtattcttccggaataaaggaattgatctcttcctctctgtcgcatatgatccgaagcgccacagactgcacgcgccctgcgctcaggcctctttttacctttgcccagagcagcggactgatgctgtagcctaccatacggtccagcattcttctggcctgctgtgcatccacaagattcatatcaagctctcttggctgtttgattgaatttttgactgctgttttggtgatctcattaaaggtgatcctgcgcatttttttcggatcttcctttaacgcctgcatcagatgccaggaaatagcttctccctcacggtcagggtcagttgccagaaaaattttgtcagccttttttgccgccttgcgcagccctgccagaagctctccctttccgcggatggttatatattttggctcaaagtcattttccacatcaattccaaactgacttttcggaaaatctcttacatgtccgttagatgcctgtacgtcataattactccccagaaacttcttaattgtttttacctttgcaggtgactccacgatcaccagatattttgccatgctacctctcctatttatcaaaatcacttatgtctgaattttcacataataatgtctgctgatttctctgatcagtcccaggatacttaattctacaagaatactccctgttttttcagcagaaagccctgtttcctgcataatactgtccctggattttggtcgtaaatcgagacaactatacaccatattcaaatcacttgcaagtcctaagttctttttttcagatgattttacggtatttttacaatttatcccaagttcttccagaagcacttccggcttgtatgccagccctgcgccgtcatagatcagcctgtgacagcccctgctcagttcttcatttacaggacccggaagggcaaaaaccgcctttccctgttccagcgcccactgggctgtaataagggaaccgctcttttcttttgcctccactacaagaacaagatctgacagcgcacttaaaattctgttccttgcaggaaaatgataatttctcggctgagtgcccggaggatattcactgatgattcctcccttttctctcaaaatcctttcataaagattccggttggttgccggataacagacatccggtccgcttcccagaactgcccaggtgggcatccctcctgcaagcgctcctctgtgtccttccgagtcgattcctgttgccattccgcttatgatctgcactcctgcttctgccagcgtctttgcatactgaaacgcctggattcttccgtagggactgcacattcttgcccccacaactgcggcacagggtctttccggatccggcagccttccttttatataaagcttttccggcatgtggtcataggctttcagtttttccggatattccggctgacctttttcgatacatctgatattgtctgagtgatttctttccatataaaataccccttctcccgtttttttatgactttttatttttctgttcacgaccagtattttttgtcaaaggcacggtaggacagcgcttctcctatatgctctttttttatcagctccgagccttccatgtcggcaatggttcgggaaaccttcagtatcctgtggtatgctctggcgctgaaatccattctgtcaaaggctgcttccagaagcgctttcccctgagcatccgtccggcaataagcttcaatcatgtttcctttcagttccccgttgaactgaatgttttctttctgatagcgatttctctggatttcatgaaccttttccactcgtttcctgatccggtccgatgcttccccctgtcttccattcagactggaaaagcttaccggttctgcttctgcacagagatccagacggtcaagaagcggctgactgatcttattcagataccggcttacctgcccggacgtgcaccggcatcggttcatatccggataatacccgcagggacagggattcatagctgcgcacaggataaaatcagcaggaaaggtataggttccgtatactcttgaaatccgtattacccggtcctccagaggctgccgcaggatctccagggttcttctggaaaattccggcatctcatccagaaacagaacgcccctgtgagccagcgtgatctcccccggtcttggattacgcccgccgccggcaagggcaggagcaggactggagtgatgaggacttcggaaaggccgctgccttaccagaggatctgtgggagaaagaagccctgcaatactgtagattttagtcagctccaggctttcatcaaaggtcagaggaggcatgattcccggtatccgtcttgccaccatggtttttcctgctcccggcggtccgatcatcagaagattatggaatccgcttacagaaatttccactgctcttcttaaagattcctgtccccggatctcactgaaatccagttcctgtcccggctgctctgtttcctgtctgatacagggctgtctgtactttccgggagctttcagaaaaatgatcagctcttttaaattttttacccctatgattttcatatccggcaccagacaggcttctctcatattcccccagggaacaatgcacagccggcacttttcttctcttgcccttataacaataggaagaattccgggaatcgcatgaatttccccattgaggcttaattctcccgcaaacatgactccctttaaaacttccggctccagaatgccggaagcagccagtacggctgccgctaccggaacatcaaatcctgctccttctttttttatatcagccggggcaaaattaactgtgatcctttttggtggaagcgcgatctcattgtttttaaaagctgttctcactctgtcctgagcctccttcacctgagcagagggaaaacctaccatagtaaaggacggcagtccatcgcttacatcggcctccacctgtaccggatgtacttccataccgaggatcactgcagataatactgctgcaaacataacactcctttctgcgaaaatcagtccccgatcctgtttttcacgaaaaaataaagctgtacttttaaagaataactataaatggaaattccagcagaactgctgtctaagaaatagaaattgaaaagatgatttgtctgttcttttattatagggctgaagccctggaaacacaagccccagccacggaaatgtggcgatattccaaatcccgcctgatagcaaaaaaggcacctatggttttccatacgtgcctttttgtttcatgatatgatttatgatcagtttcctgctgcccttttcagcatttcccattcctcaattttctggatatttgcaatctcatattcattaaaaatggaaccctgctgagcgtcaaaggtatccggatccacagttccctgataccaggatttgccgttaaaataatctgcaatactctgggtcacaaagatccttccgtggcgggcatagatctcattttttgcaagctcaagctgagccgacgaatacacagatacctcatcatctgtcagatacctgctgttgctttccggaaagaaatattctccagtctggctgatctgctgattctgaggcatcggcgttggcgttgccgtaggatccggtacaagctgaacctgattccggctcataatacagtccacacttgggaaaacagcagataccggttcgctggttacgatctttacataaagctgtccattgtcaaaaatcagattccctgatgaactgtttccggctgaatcggaaaaataaaatttcgccgcattgccggcaacctcagcggttacatctgccgtcactgtctgggtctgattgcggtccgtctgagaaaaactgaaggatacggtatccagactgatattataaatattcattgtcacagttccgtctgtactgtaccattcattccagaaatcatccggattaaaggcagccaccactgtcggaatcggtgtaggcgttgccgtgggtctcggtgtgggagaaggcgttacggataccgcaagggtaggggcaacggtaggcctgttttccagtgcttccagcgcctcctgttttttctgctccttctgtgcgctagtccgaaggcctacaagaagcagcgctgcggcgcttaccattataaaaaccgcagtcagtacacagagcagtattttcagtatctctcgttttcttctcattctgtttcacctctgttctgcacgtacccttcataactgatttcttatggcagttctttattccttgccgctccagcaataagtacaaagcttgcacggctcaatatcaatagaagccacaagatcgtcaagacgatggtatttcagggtcgtaaagttcagctctttgcggatatcctccagcattcccttataattctcagaatccggatttgcatagtccgcaagagttttttcatccacattgtcaccttcccgctttgcgatcactcttcttgtgatcagatccatctcggattttgagcgggaaaaattcagatatttacatccgtacaaaagcggcgggcaggccggacggatatgtacctctttggctccgttgctgtaaaggaaatctgaagtttcgcgaagctgggttccccttacaatggaatcatcgatcatcagaaggcttttatccttgatcagtctgtgaacagggatcagcttcattctggcgatcagatttctctggctctgctgggttggcataaaggaacgcggccaggtaggggtgtatttaataaacgggcgggcaaacggcactccggagcggtttgcataaccaatggcatgggcaattccggaatccggaacacctgccacaatatcaggttttacctctccaaaatcacgctctgccagcatatcgccgcatttatagcgcatttcctctacatttaccccctcataggtggaagtaggatatccatagtatacccagaggaaagaacagatacgcattttgtctccgggcttctgcagagtttcaattccttccggagtcactgccacgatctcgcccggtcccagagacttttcatcttcatagcccaggttgatgtacgcatggctttcaaaggaaacacaccgagcgccgtctttttttccaataataagaggagttcttccaagacgatctctggctgcaaaaagtgcctttggagtcaggatcagcatggtcatagatccgtctatcatttcctgtgcatagcggattccctctaccatagttgacttctgattgatcagagatgcaaccatttctgtaggattcacatttccgccgctcatttccagaaaatgtgtgctgccgtttttaaaagaatgctccacaagctcttccatattattgatcttacctactgttgtaatggcaaaattcccaagatgagaacgtaccagcagaggctgaggctcattgtcagaaatgcatccaattccaagattgccctgaagctctgatacgtctctgtcaaactttgtacggaacggggaattctcaatattatgaatggctctgtcaaatccctttgccggatcatatacagccattcctccccttcttgttcccagatgagaatgatagtcaattccgaaaaacagatccagcacacagctggactttgaagctactccaaaaattccgcccataattctgttctctccttattatgttttttcgctacgtgaagctgagtaatcgccagtctgtctcagaccggcaatccctagtttgatcttccgtatttactgcaagcatcattatataaaaacaggaaaaataagtaaagcctttattttgtttcttttataatacctttcctgtaggcttcaagaagacgggtaagttcctgtatcctttcccgcaaagctttcccgttgtctgtatcccctacaagacgcctttttgaagaataatgcacagccatctggctggatacaatgtcattccctttggaaaccgcctcctccgcagaggtaaacggctcatgggctgcaagaaacaggccgtaagagttatagatcagagtgtagcctgcgattccggttaccttctgatacgccttgcacagaccgccgtcaatgacgatcaccttgcctccgcattttaccgggctttcgccctcgatctgatgcaccggaacatgaccgttgataatgtggctttttgccggatccagaccaaactccaaaagcatgcgatccactacctcctccttttccagaagctggtagtaggctccctttttctcttttgcaatttctttatcctctataaagtaccgctcaaaggttgtcattttgtccttgccgaacagaggggaatttggtcccgcccagatataccacaggatatcctttccctttttctgttcctctgcatccacggaaaaaaacgccctgcgcacatagctttccagaatatcgtaaagagccctgccactgtaagtttccccgtaaacctctacttctttcatgcttccgtcctcattaagaggaatgcagccatgaaaaagcagatttccgttatagatcttgtacaggcctcccacgtcaagaagaaggcgcatatgattctgaagcttttcacagttccggaaggctgcttccagccgctccataacttccagttctcctgcagtaagctcatagggattttcccagtcaatggtgggaaacagattgtccctgagcgcatattcctttccgtccggcatgacaatgcttcccttttccggatcaattctgtgaagaaggcagcgatcctccatatgaaattccctgcgttcccttaaaagctgaccctccagcttaaactggatcatggcaatggccttgtgcattttgcgcccaagctcctgttccagagaatggtagtcagaaacacccttgatcccgaacactgtgcatgggtcatccttataggtttccatggcataggtggccagcggaagcatgttgatcccatagccgtcctccagaatatccaggtttccatagcggatactgtttcttactactgtggcaatgcaggctctctgtcccactgccgcccccatccacacaacatcatggtttccccactgaatatcaagagaatggtattccatcagccggtccataataaaatgcggccccgggcctctgtcaaaaatatctcccagaatgtgaagatgatccacaaccagccgctggatcagttcagcaagggcaacgataaagttttctgctctgcggatctctatgatggtattgacaatggaattataataagcttccttgtcaagaacctccgccttctctgtgatcagttcctctatcacataggcataatccggaggaagagcctttctcaccttggatctggtatatttggatgcagttgtcttacacacctcgatcagacgatacagggtgatcttgtaccagttttccatatcctcctctgtttttttcaccaggcggattttttctcttggataatagatcagggtggcaaggtctcttttgtcatgattgcttaaggtatggccgaatacatcgtctattttttttcgcacagcgccggaaccgttcctgagaacatgagaaaatgcctcgtactctccatgaagatccgacataaaatgttctgttccttttggaagatttaaaatagactgaagattaatgatctctgtagaagctctcccaatagtggggtacagttctgccagacgctgtaaatagcgaagttcatcttttttcataattgtctcctgttggaaaattgttctgtaatatttccgtaatatattataacatgctgcagaaacttcctgtaattccggatatcttaaggttctttctcgagatggcatatacatgccaaaacacctcccaggacagcgacctgtaaacagtatccgtcaggtgatcacagtagcctcacaggacaataccgtgtaaacagcagcgtcaggcagtcacaccacatcaaacagggagaactgattggactggggaatatctccgaacagccccagatcgtccataagatcaatgactgtcttactgaccttggtgcggtcacggaaatcatccttggacaggaattttccctgctttgcagcctccaccaccgcctccgcagccttgtctcccattccgtcaatgctgttcagaggaggaagcagcttgccgtcaatgatctggaagcggtttgcatgggaacggtaaatatcaataggaagaaactcgaagcctctggcgtacatctcctggacgatacgcatgtccctgatggaatcctgttctttttttgacgcctcgtcgcctttttttcgaagctctgccagataatattccagcctgtcccgtcccatacacatggtctcataggaaaaagcagttgcgcggatactgaaaaacgcagcatagtatgccaggggaataaacaccttaaaccaggcgatccgccatgccatcataacataggctgccgcatgagctttggggaacatgtacttgatctttttgcaggaccagatataccattccggaacattatgctccctcatagtagcctcccactcgtcccggagcccctttccttttcgcacgctctccatgatcgtaaatgcaaggctgctctccactcccatactgatcagatagatcataatatcgtctcgggtacagatcgctgtggaaatggtagcctttccttcctggatcaaagtctgggcatttcccagccatacgtccgtaccatgagcaagtcccgcgatccggaccagatccgaaaaatactttggctgggtatcaataagcatctgcatggcaaagtctgtaccaaactccggcacacccagacagccaagcttgcaccctccaatatcctccggagtgatgcccagggcttttgtgccggcaaaaagggacataacctctttgctgtcaagagggatctcctgggcattctttccggtcagatcctccagcatacggatcatggttggatcatcgtgtcccagaatatcaagcttcagaaggtttccgtcaatagaatgataatcaaaatgagtggtaatgatgtcgctgttttcatcatttgccggatgctgcaccggcgtgaatttttcgatttcctcgccttttggcagaacaatgattcctcccgggtgctggcctgtggtacggcggatgcctgtgcatccctgaacgatcctgttgatctcgcagtaccgcttgtgctgaccatgctcttcaaaataatttttcacatagccgaaagctgttttttccgcaagagtaccgatggttcctgccttaaaggtctgcccttttccaaaaataacctctgtatatttatgagcgtttgcctgatattcaccggaaaagttaaggtcaatatccggctccttgtctcccttaaagcccagaaaggtttcaaatggaatgtcaaagccttctttgatcatttttgtgccgcagtgagggcagtttttgtcaggcatgtcacagcctgccattccgccgaatttttttacctccggtgaatcaaaatcactgtatttacaatttggacagatataatgaggcggcagaggattgacctccgtaatacctgacatggtagctgccagagaagatcctaccgatcctctggagcctaccagataaccgtcgtcatttgatttccacacaagcttctgggctatgatatacataaccgcatatccgttggaaataatggaattcagttctttttccagacgctcctccacaattcccggaagcttctctccatagatctcgtgggcttttttaaagcagatatcccggagatcctgatcggagtttgggatcaccggcggaaatttatccggatggataggcgatattttttcaatcatgtcagcaatcttattggtgttggtaatcacaacctcttctgccttttcacttcccagataggaaaattcctccagcatctcttctgtggtacgaagataaagaggtgcctgattatccgcatcagaaaatccgtttcccgccatgataatgcgccggtaaatctcgtcctgaggatccataaaatgaacgtcgcaggttgccaccacaggctttttaaactgctcgcccagctttacgatttttttgttcagctcaatcaggtctgcctctgaatttacggtatcatttttgtcactggcgatcataaaggcattgtttccaagaggctggatttccaggtaatcgtaaaaatccaccagtctggcaatttcctgatccggcgcgttccgaagaagagcctgataaagctctcctgcctcacaggcgcttccgatgatcagcccatccctgtactccagaaaaacacttttgggaactcttggccttctcctgtaatatttcaggtgggactggcttacaagcttataaagattaatgcgtccagtctcatttctggcaaaaataaccgcatggtaagtgggaagctttttgatggtatccacagatacatttccctggctgttcagggcatccacatcaaaaatatccctttctctcagcatttccacaaattttacaaaaatatccgcagtgcaggcagcgtcatctactgctctgtggtgatgggcaagggaaactcccactgcttttgccaccgtatccagcttgaaccggttcagcgccggcagaaggaaacgggccattcccacggtatcaatgtaggtaaaatcatcgctgatgccctgccgcttgcagttttctataataaagctcatatcaaaatcagcattgtgggcaaccatcaccgcaccctggcaaaattccagaaacttcggaagaatggtttcaatatccggagcgtccataaccattgcatcattgatactggtaagctgctcgatccggtagggaatgggaaccttcgggttcacaaaggtggaaaacctgtctgtgatcacgcctttttccacccggacagctccgatctcaatgatcctgcaggtcagaggggaaaatcccgttgtctctatatcaaataccacaaagcttccgtccatggactgccccttactgttagtgacaattcccttcaggtcgtctaccagatatgcttccatgccgtaaagcaccttaaaatcagaatcctttggcacacagcctccccaggcgtcaaagcagtggtttgcctcggggaacgcctgaaccacaccgtgatcggtaatggcaatggccttatgtccccactcataggcccgctttaccagagcctttgcctcggtaacgccgtccatatcgctcatttttgtatggcagtgaagctccactcttttctgaggactggtatccattcttgtactggtaaagtctgcgatttttttaattccggcaatggagccaatggtcagctcactgtcaaaacggtcaatggtggtaactcccttcagcttcagaaaggctcccttttttatctcttcttttacttccggaacctgctcgttccgaaggaacattttgatcacaatagagtctgtaaaatccgtaaccggaaaaataagaatggttttttcattccggatctctcttgcctctacatccagaacctgacctcgtataatgacttctcccatttcccctgtaatgttttccagaggaatggtttcaccctcaaaatctcttccatatataacatccggattgctgtctcttcggaatccaccccggaagtcgcctccatgtccctttttgtcaaaggattttttctcctgctttccttttccggaagcttttttattctcttttttgtcagaaccggaagaggcttcctcctgtttcggcgtttcttcctctttatccagctttgcatgtttcaggacattttccacttcctgctcaatctgaagaactgcatttttccggtacttgctttcctgagcctcttcaaactgaagctcgatcttcagattcattccgcagcgttcacagaataccttatgaagatattccacaaggatttcacttttttcccgggcgatcacagaatccggaagcaccagattcatttcctctgtgccggaaaaagtaattctggaccgtttaaaaagattatattccagcatattgtaattccgcagctccagttccatgctggaccggtacacctcaagaaaattatccggcgtatactgtctggacagacggaacttttcgatcaccgttacctgcatctggattcccggaaagcactgtctttcaatctgctgctgcagctctatgatatattttttgtggatccaccgttcactgctgatataaacccacagtctggtcttatccggattgcaggacaccctggtgacagctaccatatccagaagctcctgcagcggatccttgatcttcagatttggaaatacgtcaaaaaaatctttttccattttttcctctttcttattcttcccagtgaagaagctcttctcttagggtatccagaagctgatcctccggaaccttttttatgatctctccctttttgatcagaagccctacgcccactcccccggcaattcctatatcagcttcctttgcttctcccggtccgtttaccacgcagcccataacagccaccttaatatcaagagggatgtcctggaccattgtctccacctgatttgcaagaccgatcaggtcaatcctggtacgtccgcaggtaggacaggacaccacctcgatccctccttttcgaagtcccagagttttcaggatccgttttgcagatttgatctcctccagaggcgctccggtaagagaaacccggatagtatctccgattccctgagaaagaatgatcccaagccctactgcagacttaatgtttccggaatataaagttcctgcctctgtaattcccacatgaagagggtactttgtcttttctgcgatcagctcatgggctctggcgcacatcatcacatctgaagatttaatactgatcaccagattgtcatatcccatatcctcaatgatcttcaccttgtcaagagcgctttctaccagcccctctgcagtgacaccgtgatatttttccaccaggtccttttccagagaaccgctgtttacgcccacccggataggaatatttctttccctggccacatctacaaccgcttttattctctcccggcttccgatatttccggggttaatgcggattttgtctgctccgttttccattgccgcaatagccagcctgtaatcaaaatgaatatctgccaccagaggaatgtgaatctgctttttgatctcagaaagcgcctctgccgccgccatatccggaaccgcgcaccggatgatctcacatcctgcagcctccagctccaggatctgctttacggttgcctccacatcatctgtccttgtatttgtcatagactgaataagaacaggatttcctcccccgatttttttatttccgatttttataacctttgtatgttcccgatacataatcttcctcctgaaaaatttattatgaaacacaaagaactgccacagcttttccggaattcccggctgtgtgacagcccttttttctttatctctggatttccagaagctttgctttcagatcgttttccatccgcgccatctccgcttcggcagcctgacgctttgctctgccttccttctgtatccgcatcacatcgtccagggtctggatcagttctgcatttgtctgcttcagagtttccagatccacaattccccgctcagactcttttgcagtttctgcagatgccatatgaagtgtttccgcatttttacgcaaaagctcatttgtcacatcagatacctgtctctgagcctgcgccgcctgggtagaatgagcgattccaagagccagcaccatctggcttttccacagaggaatggtatttacaatagttgtctggatcttctctgccataactgtattattattctgcacaaggcggatctgaggcgctgtctgaagcgagatcatccgcgtcagctccaggtcatggagctttttctcaaaacggatacactgactgtccagatccctggctttctgcgcatcctccggcagtccgcttaatccggccttttcggaaagctcttttaattttccgtttctgacagcggaaagctgtttttttcctgccaggatatacatggaaagctccctgaaataaaggagattctgttcatacatcttatccatcaacgcagaatccttcagaaggcgtacctgatgcttctgaagcacgtctgtgatccgttctacatttgcctctgccttgtcatacttgtttttcagattttcaattttatttgcctgttttttaaaaaatccgaaaaatcccttttcttcttccgtatcaaaatccttcagctgacttaccacgtctgtgagaagttcccccacttccccaagatcctgagttcttacatttttcagcgcctcatccgaaaaatccgccatttttttctgggttccggctccgtactgaagaatctgcgccgtattttccacatcaatcttttctgcaaaggaatccaccatcttctgttcctcagaagtcagttccatccgggccatttccttctgtaccggatccatatccggagtctcctccataagagcggcaggattttccggctgttccggagcttccggttccagctgcggctccagtgtgagaaaaggcattgacgcttctgttttgtttaattcttcgctcattttgttctcctttatgatcaatgctgtattttaaaatcactgtccttcagcccttcctgggcaagtaacgtatgaagaacggaaatatcactggaaacatcccaggctgtatcctgaaaaacagaatctagaagctttgcaaaagcatcgttcagagtatccagagtatcttcgatctcttttttggaggaacggatggtttctccctgaacaggctgactgtccatatcctcataagcctccagaagctttacggtcatgggaagataataatccatcatccgcttcagatccggaatgatctccggatgagccttggtcctctgaaaaatctgctccacgattttttccattttaaagatcttggcagaaatttcctcccccggaatggcatcgttgctttttctcagtctgtccagataattccttcccttttcaagcacctcttttacctcaggggaaagctctgactcctcctgtgcgcggagagcctcctgtttctttttttcctccagagctttttccatttcctgatactggcaaaaggtttcccggctggtgatcaggcaggtttcgctgccgtcaaaacagccttccgtaaaccagccctttccgatcatttttttcagatctttttttacaaatttcacaggctttccgactgcctgcgcaagctttgtaagatcacagtaggttctttttcccagagttttctgatattttttgaatctcctgagcttccccagtccaaggatacctgttcccagcataaaggctcctgccgccattcctgtcagcataactgccgccgctccgctgcttccggaatctgtcagaagccgtaccatctggactgccagaaatccacatgccgtacttcctgtaagaattcctccaaatacagcaaggagaatacttcttactttctctccggtcggcttcatataaagcatctgaagcttctcaccattggctgcgcttcccgattcccggtcactgcgatgatcagcctgcggcttctctctggtttttcccatttccggatgctcttttttatactgatccagggttttatttaccatctgtgtcactgactggctcatttcctgaaaatctttagattttacagccttttcaatgatgttctgaacctgctgtattttatcttccacaacagaaaaatcaaaatcctgactgttgtttttttgatttttttccatattctgtctccatcagactgcttctgctttttgggatctgctcccgtgcagactgtatatttattatagcgaagtaccgttcaaaatacaagttttcattgaagttcaccggcaaaagtgctacactgattatatctcacagtaacgtggcaaagtatttaaaaagctgttgtcacaggataacaggaggatgatattatggaaaaaaagaacattgactggggaaatctgggttttggctatgtccagactgattatcgctttgtctcagactttaaaaacggttcctgggacgaaggaaagctgacagaagacgcaactgttgtgatcaatgaatgtgccggcgttcttcagtatgctcagactgtttttgagggaatgaaagcatacacaacagaagacggacggatcgtaaccttccgccctgatctgaatgcagaacgtatggaaaactctgcaaaaagactggaaatgccggtatttccaaaagaccggttcatccaggccgttgtggacaccgtaaaagccaacgccgcttacgttccgccttttggttccggagctaccctttatatccgtccctatatgtttgggacaaatccggtcatcggtgtaaaacctgctgacgaatatcagttccgggtatttaccaccccggttggtccgtacttcaagggaggcgtgaagcctcttactatccgtgtcacagattttgaccgggctgctcctcatggtacaggtcatatcaaggccggactgaattacgctatgagtatgcatgcgatcatggacgctcaccgccagggctacgacgaaaacatgtacctggatgcagctaccagaacaaaggtagaggagaccggcggagccaacttcctttttgttacaaaagacggaaaagtggttactccgaaatccgacagtatcctgccttccattacccgccgttctcttatctatgtagctcagcactgccttggtctggaagcagaggaacgcgaggttacactggaggaggtaaaagattttgctgagtgcggcctttgcggtactgcagcagttatttctcctgtaggaaaaattgtggaccacggaaaagaaatctgcttcccctccggcatgacagagatggggcctgtaaccaaaaagctttatgaagctcttaccggtatccagatgggacgtctggaagctccggaaggctggcttcaggtaatcgaataataccttccaaaaagtcaaacgctgcagaaaatataaactctgcagcgttttcttttccggaacatgtctgttcctgtgtcatatttttattttactctttcgtatttcacaaactcatattccagatcaaaataagtctgctcttcgctcctggctgtgatctcccattccggagactcgtccagatttgggaaatagcggtctgcctcatatccaaagtcgatctttgtcacatgagctgtgtcacaataaggaagaagctgtttgtatacgctgtctccacccacacagtaaacctgatcggacggatatttttttatttcttccagaagctcttcgatactgtgaaccacggttgcatcctttaccttaaagtctttatttgtggtaaggataatgttggttctgtttttcagaggaagtcctcctggaaatgtttccagtgtttttcttcccagtacgatcacctttccggttgtctcctgacgaaacattttcatatctgccggaatggctacaagaagcttgttgtcctttccgatggcccagtttttgtcaactgctacaatgatattcatggtatttttcctttctgtttttagattgcaataggaatatttttaatctgtggccaggtctgataattttccacaatcagatcatccactgtaaaatcataaaagttcttaatctccggattcagtctcacagaaggcgccggatacggggttctgctgatcagctcttttattaccggaatgtgcctgtcgtaaatatgacagtctgagatcacatgaacaagctctcctgcctccatgtcgcacacctgggcaaacatcataagaagaatggaatactggcacacattccagttgtttgctgccagaatatcctgagatctctgattcaggatcgcatttaaagtcagcttgtcttttcccggttcctttgtcacattaaaggtcatggaatatgcgcagggataaagattcatttcatgaagatcctgatgcacataaatattcgtcatgatcctgcggctgtaaggattgtgtttcaggtcatagagaacacggtctacctgatccatcattccttctttatattcatgcttcacctgcatctgatatccgtaggccttaccgatagagcctgtctcatccgcccagctgtcccagatatgactgttcaggtcatgaatgttatttgactttttctgccagatccagaggatctcatccatcgcgcttttcagtgcagtcttacgaagagtcagagccggaaattcctttctgagatcataccggtttaccactccgaatttttttattgtataagcaggcgttccgtcctcccataccggacgtaccttttccccctctgtgctggtgccgttttcaatcacatctctgcacatattaataaatattgtatctgcaacactcatgtccgcgcctcctttttgcttttgtttcctgggcctttccggaaaacctgctgcttcaaaagtcgttttcccggcaggccggattctgcctgttattataccataccagagccgtgattgccagagtgctttacaaaccaatgccgccgtgctatattaaaactcatgaaaaaaatactcataacacttttaaaaccactttcgtttctgccagcgctgctgatgatgtatattattttttcattttctgcccagaccggggaggtgtccgggaatctcagctacaaaatcagctaccagatcgtagaaaccaaaaacgaacttctcaataccggaaaaagctatgaagagcttgcatacgaggcagagcagattcattactatgtccgcaaggccgcacacatgacagaatactgcctgcttgccgttgctgtttcttttccattttatgtatatcgcatcagaggactgcggctgtttcttcttgccgggatcatctgcgtgggatttgccgggctggatgaatatcatcagtcctttgtggccggccgttctcccgggatccgggacgtaggctttgacagcctgggcgctctgatcgggatccttctggttcagctcttttgctggtccaccctccacgcgccttcttccggaaacaaaaagcgccgtaaaaggcggtaacacacagaccgggggaacatggattttcatgttcccccggcctttttacaatattctgatttctcccggagcttattcctgatcttcgtccttatccttctcctcttctgtatcagaattctgcgcttcctgcgcctctttctccgctacatttcccgccagtttcgcacgctctgcaatggtcattctcttaggctcctgaaccggctcaaccggatgttccttttcctcttccgccgctgcggcctttttggcatcgcttctctgtttcgcagtctttgctgccacaaaaagcattcctgcgccaatgatcagaaaagcggctcccgcgatgaagaatccccagcttgccccctcttcgcctttcagcacgtttgcgcagagcttataacctgtatagagaaggtatactccggcaagaagcagaaggccgaaatttgccgcaggtctttcctttttttcaggctctgaatctgctgaagccttctcgctgttttcagatgtctgaatctcagtttctttttttaactctgtatcagcagacatttccagttcttcatttctttcttccatataaatgtccctttcgtatgttttttcattttcctgcatttatgttttccgttacagatcttaaagcttccgtgtatctgtcagagatgtactgttcagcattttgtatcctgcgcttcttcctctgacagcttctcttcagctgactgctcttctgtttccgataccggttcttccttcttcagacgtccgtagatccggttcagttctcccattgtataaatggtaatatcagaaagctgtccctttcgcattctccatctccagttcagccccagggttgcaggcgcattcagtcttgcttcgtttcccaggcacagatagtcctgaacaggaatcacagccagatctgccacactggccagggctgtgcggatcagtccccacacgcagtcgttcacaggcctgtcataacagttgatatatgcccgtacaaactcattgtcatgtccctgcagaccttccagccatccttttgtcgtctcattatcatgagttcctgtatagaccacacagtttttatcatatttatgaggaagatattcactgtcctcgcttccgtcaaatgcaaactgcaacactttcattcccggaaatccggtgtcctttacaagcttcaccacgctgtctgtcaaaaatcccagatcttctgcgatcacctgaagcttttgtacatccttttttaacacctcaaataattccagtcccggtcccttttcccagcggccgttttctgcagtagcatctccgtaaggtatggaataatattcgtcaaatcctctgaagtgatcgattcttgccacatcataccgctccatacaataggtcattctctgtatccaccaggcatagccggtagccttatgctttttccagtcataaagaggatttccccacagctggcccgtagcagaaaatgcatccggcggacagcctgcaacagcctttggactgcattcctcatcaatctgaaacagttccggattcgcccacacatccgcactgtcaagggcaacgtaaatcggcacatcacctatgatcttaattccttttttgttggcataggctttcagctttttccactgtttttcaaaaagatactgctggaagcaataaaaacccacttcctctgacagctcgctttccgctctttttacatatccggagctgcggtctttcagttccttcggccagtccagccagctctctccgtttctgctgtttttgatcgccatataaagagcataatctttcagccagatctgatactcccttacaaaagcctgatattcactgtcattttccagatccgctctttcataggcttttttcagaagtggaaatctgctgttatatattttttcataatccacatagccggggtcatctccccagctgcaggaagtacattcttcttttgtaagaagcccttcccggaccagttcatccagatcaataaaatatggatttcccgcaaaggtagaacaggactgatacggagaatctccatatcctgtcggaccaagaggaagaatctgccagtactgctggcctgctttttccagctgatctacaaactcatatgcctctctggaaaagcatccgattccatattctgacggaaggcttgaaacagccattaaaacaccgcttgctctcatttattcttctccttcgtgtttcgcactaaatgaatccggcttctcaggtccatacattataaagtcttagtttttgccggtcacccggagaacattataccaatccatatgcttatggtcaaggaaaaagccggggacatctccccggctttcgcaccttgttactgtttaccgccttcacagcaacctggtcagaatacataccaaatcacctttgatgatcacattttgccctgtatatcccctgagcatcagctccgcctttcaaaacagtgctgtgcggacactaacacaagctctccattgtcctctgcctgtttttcggttcttccgcagcctgccagacagaaagcgcataaaatacctataaaaattattttccgtgttcttttcaccgggttctctcctttatccatacagatattcattcatagtatggacagaaaagtatcttctattcggaaagcttataatactcagaaaccttttttcctgatatatacagaaatatctctgaatacccgctcccggtctttttcgttcagaatttcatggcgcattcccggataaagtttcccttttacatccctgtagcctgcgtctctcattttctgaactgccgctgcaaactgccgcacattgcccaggcacggatcgtctgcgccgctgataaaaagaacaggcagctccggcttcgtacagttccagtgcttcacatcataagctcttttcatcagctgaaacagagccagataagcatcgtccgtaaacgtaaatccgcaaagttctgagtccgtataagcctgatatacctccggatccgaacagatccatgcgtttctgtttttttccccgctgaacctggctgcataattcccaaaggacagtatttccagaagacggcttctgtgcctcattccaaagagttttccttccagtttcgcgatcacgctccctgcgatccgcgccctccggttgctgggtgagccgcagacgatcagcatatccatgcagtcatcatgctctgccgcaaaagctctcactgccagggaacccatgctgtgccccatcagtatcagaggaagatccggaaatttctctctgatctgccggttgacactggcaatatccgccagcatggcatctgctcctccgccgtacatgtaacccagatcatccccggagcggacgctctgcccgtgtcctctgtggtcgtggatcactgccacatacccaagagaagccatgtactccataaacggctcataccgttccttgtgttcgctcattccgtgtaccagctgtattacacctttgtacggcatttcctccggacagatactgagagctgagattctcagtccgtccgcatctgatctgaaaaactgtctgtatctttttaccatatctattttcctcctgccctgtcattctgtcagttatctttttattgattatctttttattttatcctctttttctttacctcctgtaatttatacgtaaccgctgtcacacaaaagatcaccggtcagcccggcctggttaaaatgccccctgaacagtagcagtcaaaaagcaacatttattcctgagacacaggataaccttgtcaaccagccgtatgctctggtataataaatcatgtaacacttacacagatactgtcaaaagactatttataaaaacaaggaggaactatggatcaacaaactcaggagagcagccaggagcaggtcactgcttccgaaaacatctctcccatcaaaaagaaaaagaagaaaaaagggctgatcatttttcttgtagtcctgctgattgccgctgccgcaggcgcaggctgttactttatggaacgccagaagcctgtctccacagtcaaatcattcctggagcatgtgcgcactatgaattttgagggaatgaaatccctgcttcagagtaatgacatgtccgctctcgacaacgcagatattacaaatgaagcttatcatgcatttttccagggcgtcaatcagaaaatgacctatgagatcaaaaaaacagatttcagccttgccaatggaactgccactgtcacagcaaaaatcaaatacattgacggttctgatatttacaaggaaaccattaccgaatttttaaagcagatcgtctccactgccttttccggtcaggagcttacagaggaacagacccagcagaagcttgccgctcttctggaagaaaaatcagcaactgtgaaagacaagtttgcagaagcagaaatttcctatcctcttattaaagcaggaggacagtggaagatcgtatctctggatacagaaaccgttcgcataatgtccgcaaactttacgaatgtacaggacgagatcaatcagtctctggaagaaatggaaacttccgaaacacagcctgagcaggaagcgcctcaggcatctgcagacggcaagattgatatgagcaatgacaaatttaccattcactataaacagcaccgggtgacaactgattttgccggagctccatgtcttcttgtatattatgattacagcaataacggctcttccgcttccagcgccatggttgatgtcaatctccaggcttaccagaacggcaatctcctggaacctgcaattccggaatcagatgacgaagccattgatcagtttatgactgaggtgcagccgggacaggcagttactgtatgtcaggcctttacacttcaggatgaatccgacgtaacgcttcaggcaggtgaggcattcagcttcggcggaggaaccgttgtctctcaggtactgaaaatcaaataattttttcaagatattcgcagctgaaaatgctgcgaatattttttttgttttttcggaatactatctgcatgaaaggatggtgacttatggataataaatttttgcagtattttgctctgaccattactattataggtgcagtcaactggggactgatcggcttctttaatctgaatctggtggctctgatcttcggaagcatgagctggctgtcaaggatcgtttatgggcttgtcggtctctgtggtctttatcttctttctttatatggagtgatcggacaggaaaggcgggaaatgtaatggcagcagatactgaaaacaaaaccacgatgtctcattgtactgcagctcctgcagagcttccggaaaactgcctggaaaaaatccgggatttcgaaagagagctgaacaaacagggatattggaatattgctcttgtggcctatcagataaaagaataaagaaaaaagagtcaggaaccaattcctgactcttaagagcgatagacggggctcgaacccgcggtctcgaccttggcaaggtcgcgcgttaccaactacgccactatcgcacaagagcgggtgatgggaatcgaacccacgtatccagcttggaaggctggtgttctaccattgaactacacccgcaagtgtttgtcttgtgagagttttttgtgtttccctcaaccgacttcgttagtatataacacatatatctaaatgtcaacactttttttaaaaaaatttatttttatttttttggtgagaaatgtaaaagtaacttccggttcttcttcacacttccggaagttacttttacattccggctttattttttaattacaggagctgctgttctgcaggctgatacagcagctcctgtttcctgttgatttctttccggatcagattagttttcccagtcccatacatccgctttggaaactgtgttccttggctttttgatcacaagctccgggcttttagcgcttaccttagtattggcaggaatagaggaagtaataaatgtatttccacctatgatcgtattctcgccgatcactgtttctccgccaagaacagtagaattagaataaatcgtcacattatccccgatagtaggatgacgtttcacatctgcaagctgctgtccctgtctggtagaaagagctcccagggttactccctgatacagttttacatttttgccgatttccgttgtctcgccaataacaactccggtaccatggtcaataaaaaagtaatctccaatagttgctccgggattgatgtcgattccggtttttccatgagcatattctgtcatgatacgtggaatatacggaaccttttccatataaagaatatgagccagacgatatacataaatagcaaacagcccaggataagaaaatataatctcttccttgctttttgccgccgggtctccgtcaaatcccgcctgtacatccttcagaagttttttctgtacttccggaagcttttcaaaaaaatcgtcacaaatggcttctgccctggcgcaggcttcttccttctgtatatcctggtcagcgtaaagaaatgcaatttccacctgacttttcagtctgtcataaaaatcattcagaagaaatgctgtaaactgctccggaaacagccttgccgccgtatcctcaccaaaatatcccggaaatatcacagaccggagatctctcaccagatcaatgatcacagatctgttaggaaggcttcttccgtttttcggcataaacagctcttccctgtcataattttctgtaagactttctgcagcttttaaaactgcttctttttttctgctcataattcctcctgtctgctgaaatctttttatcttataatatagtatagctttttctgtgcgtcaaggaacagaaacagattccaaaaataatttgactttccccgggccagccgatataataaaatctgtcatggagatgtacccaagtggctgaagggtccgcactcgaaatgcggtaggccgggcaaccggcgcgagggttcaaatccctccatctccgtcttgacaaacagattttttcatagtataataatttttgtttgatgcacatataggggattggtcaaatggtatgataggggtctccaaaacctttggtgggagttcgattctctcatcccctgcttttacggatatccggaattctgacatgaattccggatattttatttctttatcggactgtttatggtagattctcaatatcagcacactggcactggctcgcgaatcattacagaaattatcctttatctgaaaaaatcaaattataataaaatacaactgggtgttgataaaaataatccccaaagctatggattttggaaaaagaacggttttcttccagtggatactcaaaaatatattatcatggaacgaaatctgtagcatttatctgttttcaatcaggaggaaacatatggaacgttttcttacctttactgtaaataaaaattccggcttccacacagtgggtcaggttctgcgctcacagggaggcctgacaaaaaatcagatttcccgggcaaaattccgcccacagggaattctcaaaaacggggtccgctgccgggtcacagaatctgtttatccgggagatatgattactgtatgtctggaagaatccggtttaagctccgggcatctggcctcccctcctgaggctgctctgccgcctctggaaattctgtatgaagaccaggatctgttggcggtaaacaagcctgccggaattgtcacccatccttccggctgtcattatcgtgacagtctttccaatcaggtttcctggtacttccgttccaaaaaagaaaagatcgtcatccgccctgtaggaagactggaccgggaaacctcgggaatcgtaatttttgccaaaaatcagacggctgctgccagactgcaggcccagcgctgccacaatcatctgaaaaagcagtatctggcagtggtatccggatgcctgcctgttgatccctgtgctgaaaaaactgtgcctccgtcctcttctgcgcttttgtcacagggacacaccatcagtcttcccattggcccggatcctgatgatccccggaaaatgaccgtattgctgtcagacagctttacctttggcaaccttcctgtggatcttgaaaaaaattcttcacaccaacatcctctgtcacctccgggtggaaattttaaaactgccgtcacccattatcaggtacttcacagtactgctgactggtctctcgtttccctcttcctggataccggacggactcaccagatccgtgtacacatgaaatccacaggacatccccttctgggagataccttatacggaaacaccggagaatcccctgtgtctcttccatttacaagagctgcccttcatgcctggaagctttttctggaacatccttttgagggcaaaaatcttatattggaggctcccctgccggaggatttttcttccctggcaaaatatcttccataagccttctccgcacaaacacgacaggaaaatcttacctgccgtgtttgtgtgactttaactttttttgccggtaacacctgtacacagggctgccgcagcaaaaacctttttcatgtatccacagtttcctgccatctgcactttatcattttgaagctgttccagaaactgacacagatacagaaacttatcattatgacatttcttactgctgcattttcatttatctcatataaacctttatatcacctgatactcttccacatcttatccgcatccctccagaatactttttctcctgtaaaatccctttgatttctgccattataacaaaattccccatgttgtaattgtattacatctgtatttcggataattttcatctaattttgtctcagaagtatttttcttgcatttttacattgttaaaaaattatttttccggttgattttgtcccgcatttatgtataatatatagaggaaagctatagttccacttctttcacaagataacataaggtctgacagtcaggctgttatcctattactattttaagaaaagaggtaaatgtaagatggcaaaaattgatttaaccaagtacggcattaccggaaccacagaaatcgtacacaatccttcttatgaaatgttattcgaagaggaaacaaaaccggagcttgaaggctttgaaaaaggtcaggaaagtgaacttggcgcagtcaacgttatgactggtatctatacaggccgttcacctaaagacaaattcatcgttatggatgaaaactccaaagatactgtatggtggacttccgatgagtacaaaaacgacaaccatccggcttcccaggaagcatgggacagctgtaaagatcttgctctgaaagaactctccaataagagacttttcgtagtagatgctttctgcggcgctaaccacgacacacgtatggctatccgtttcatcgttgaagtggcttggcaggcacattttgtaaagaacatgttcatcgttcctacagaggaagagcttgagaactttgagccggatttcgttgtatacaacgcttccaaagctaaagtagaaaactacaaagaacttggtcttaactctgagacagcagttcttttcaatatcacaagccgtgagcaggttatcctgaacacatggtacggcggagaaatgaaaaaaggtatgttctctatgatgaactactatctgccgcttaagggcatcgcttccatgcactgctccgcaaacacagatatgaacggtgaaaacacagctatcttcttcggtctttccggaacaggtaaaacaactctttccacagacccgaaacgtctcctgatcggtgatgacgagcatggctgggatgacaacggtatcttcaacttcgagggcggatgctacgcaaaggttatcaaccttgacaaagagtccgagccggacatctacaatgcgatcagacgcaacgctcttcttgagaacgttactcttgacaaagacggaaagatcgacttcgatgacaagagcgtaacagagaacactcgtgtttcctatccgatcgaccatatcgacaatatcgttcgtccggtttccgcagctcctgcagctaagaacgtaatcttcctttccgcagatgctttcggcgtactgcctccagtatctgttcttacaccggagcagactcagtactacttcctgtctggcttcacagctaaacttgccggtacagagcgtggaatcactgagcctacacctaccttctccgcttgcttcggacaggctttccttgagcttcatccgacaaaatatgctgaggagcttgttaagaagatggaagcaaacggcgctaaagcttatcttgtaaatacaggatggaacggctccggaaaacgtatctccatcaaagatacccgtggtatcatcgatgcaatccttaatggagacatcaacaacgcaccgaccaagactatcccgcacttcaacttcgaagttccgacagagcttccgggcgttgatacaaacattcttgatcctcgtgacacctacgcagacgcttctgagtgggaagtaaaagcaaaagaccttgcacagagattcgttaagaacttcgctaaatacgaaggaaacgaggctggcaaagctcttgtttcagcaggtcctcaggaataattcttataactgacaaaaaaggatgtgattgctcacatcctttttttgttactgcgcaaatctctttaaaattcccagcatcacatgaacggctgtatccattccctctgctgtgatatgctcataagggccgtggaaagcatagccgcctgttccaagattcggacagggaagtccccggaaactaagctgagctccgtctgtacctccgcggatcggatctgtattgggctccattcccagttctctgattgcatcctttgcataatccacaagctgcatacatggcgctactttttctatcatgttgcggtactgctcatgaatttcaagttttactgttccctgaccatatttttcattcatgattttttcaatatgtctcagagtattttctcttgcctcaaaagaggctgcgctgtgatcacggataatatactgaagcgttgcattctccacagtgccttccatctcacagagatggaaaaagccttcatacagctctgtatgtgcaggtgtttccagatttggaagcatactgttgatctccattcccacaagagccgcatttatcattttgttcctggcttcgcctggatgaatattaaatcctttgattttaaacactgcctcgctggcattaaaattctcgtatacaatctcattttcacagccgccgtctgcagtataggcatactgggatccaaatgccggaatatccaatttatctgcgccgcttcccacctcttcatccggtgtaaaagcaataaatacctttccgtgaggcatggtttccttcagcagctcttctgcaactgtcatgatctctgcgattccggctttgtcatctgcccccagaagagtggttccatccgtagtgatcagtgttcttcccttcagctctttcagatgaggaaaggtcttaacagaaagcacctttccgctgtctccaagcgttacgtcctctccattataatttctgtatatctgaggatttacatgttctccgcaaaaatccggagcagtatccagatgagcgatcaggccgatggcaggtttgtcttcatatcccggggttgccggaatcgccccgtatacataacagttttcatccactctgacatctttcactccaagttttttcatttcctctgcaagaatctctgcaagatcaaactggcgtctggtgcttggcgttgtattgctgttttcgtcacttgtcgtgtggatttttacataattcaaaaatctctcatatgctctcatgtcattctcctgttctgatgcttgatttacagtgaagccttacggataaaggccgcagctgttttctgaataaactcattataatataagaatgtttaaaatacaacgaatccttgctctattccgatccattggttcccggtcagcctttttctctgtttgtcattcccttcttcatatggtatacttgcatcagtgggaaatcctacaattatccatatcggaggtacaaaatgacaaaaaagaatctgatcgtcggacagtccggcggccctacagcagtgatcaacagcagtctttacggagtggtttccgagggaattgctcattctgatgagattggcgaagtttacggtatggtaaacggaatcgaaggctttcttgaggacaggattctgaatttccgtgaagctctgccaggtgaacagctggattatctgaaacacacaccaggcgcttatcttggttcctgccgttacaaactgccggaatctctggaagatccggtttaccctcttcttttcgaaaaattcgaggaaatgaatatcggctggttcttctatatcgggggcaatgactccatggacactgtaagtaagctctccagatacgctgctcagacaggcagctctattcgcgtgatcggcgagcctaaaaccattgacaatgaccttgtacataccgatcatactccgggatacggaagcgccgcaaaatatgtggcatcaacagtacgcgagatcactctggatgccagcgtttatgaaaaaaaatccgtaaccattattgagatcatgggacgtcacgccggctggcttactgctgcctctgcccttgcccgcaagtacaaaggcgacaatcctttctttatttatctcccggaaagcgcttttgatacagaaaaattcctcaaagatgtagaaagtgcttttgaaaaaaactgcaatgtagttgtgtgtgtttccgaaggaatccatgatgcggacggtacctttatctgtgagtatgacagttctgtggggacagatacctttggtcacaaaatgcttgcaggctgcggaaaatatctggaaaatctggttcgtgaccgtcttggagtaaaagcccgttctgtagagctgaatgtaagccagcgctgctctgcttctcttatctccgccgctgaccaaaaagaggcggtttccgccggacgtttcggtgttcaggctgctttaaatggcgaaacaggcaaaatggtctcttttgtccgccgtcaggctgaagacggatcctatcaaatggaatgtggactggaagatgtaaatctgatctgcaatgaagaaaaagaagttccggctgaatggatcacagaaaacggttctgatgtatctgatgaatttataaaatatgtgactccccttgttcagggcagtgtcaatgtacctctgggcgaagacggtcttccggtatttgtttacagaaaataaaatatacgaaaaatcaagaaagaagctgacatataagcagcttctttcttgattttattattctgaaaattctttatgatctctttctaattgttcttctacttctttttgttttctctcttcttcttttttctcatccctgcttttgggaaggatcacattcagcagtacagcgattattgttgcaagcactaccggagattttccgaatattgtagtaacccatgccggaaacgtagaaagcgctgccgttgcctgagaaacgcctactcccagagctgctgcaagacctacgatcgaggaattgcggtaatccatttccgcagaagccaccagcttcattccggtcattgctatagaggcaaaaacagaaaccgttgctccacccagtacacactgaggaatcgtagtgagcagggctgaaaacttcggaacaattcccgctactgcaagaatcactgctgccagccccagaacacagcggttaataacttttgttgtggtgacaataccgacattctggctgtaggtcgctgttggcaggcatccaaagcatgcgcttaaaatattcgtcagtccatagcccacaataccgctttgaagctctccgtccttaggtgtccggttcattgctccgatggtggttgcagaataatcgccgatcgcctgaacagaattaattgcaaacaaaagccctatagccacgcaggaagagatctcaaattctatcccaaaatgcataaattccggaacctggaacatgcccgcctcacctacgctggaaagattcaccattccaaacggaatcgacacaatgtaacctgcaataattccaataagaatagaagccagtttccagattccttttccaaaatggttcagagcagtcactactgcaagagtaaaaaacgcaaccagccagttctgccatgctccatagttttcacttcccactcctcctgccatatagttaatggccgtaggataaagagacagacctatggtgaacacaacggttcctgtgatcagaggcgggaaaaatacacggattttttttaccagaagtcccataataagggccacgataccacctacgatctgtgctccaaaaatcgtagcaatcccatagccttctgcaatagcctgcatactcggcacataggcaaagcttactcccatgatcatgggaaggcctgaaccaattgcaaatttccctcgttttccaatgggaaaaagctgaatcagcgtagcaagcccggacataagcagagaagcctgtatcaaaattacacggtcctgggaattcagaccgcctgctgcggctcctgccacgataattgccggcgtaacacagccaacgatcattgcaactacatgctggagagcaaggggacaggcttcccgcagcctgggtaccccatccagctcaaaaatactccctcgtttcataaaaatctccccttccttttcttatatgaataatactgctttgcttattataccagacaaaatgcataaaaacaattaggtgaactaaaagtttttgtatgaaatatcaccaaaaaacaggagggatttttgtgtacttttttagtaaatattcatttcccgattatcatcactgagtgatctgtttcattaagtaaggagctcaaaggtgtgatacagatctattcttccatacccccattccggatttggatactgcatatcttcttctctgactgcccctcttctcagataattttttacactgttaccggaaaaaaaaggctcgttgccacggataatggcccactcaaataaaagagctgcaatacctgaggtctgcgccgctgcaagacttgttcccgatgactgtgtgtacgttcctgccggtcctgaagctgcagctttcatatccaccccgggtgctgcaaaatcaggctttaccacattatctgtgttgtagcctctgctggctttgctgtaaaggctgtcgtctctgtactgataggctgtcacagtcattccatttaccgcgtctcccggcgcagtaaccgtatactccggagatgactccagaaaatacgtctcctctgagatcatcccctgtacaggaagccatacatgaaatcttgcagaactgttcagtcttcctgaagtttccagtttccagattccctctgccggatggagaaaacgaaaaaaaatcagcgtatttcctgatctcctttcaattggaacataatttaccatcacctttgtttccacaaacacaaacgacagctcctgagtcccgtatttcagagcgctgcttacctgcagcctttccccagtcggagactgaatagttacatgataaaaatccgatgcctctccccagaattccatagaaaatccatgtaccgcttcctttgcccccactctcagctccagaatatcagaagtggttttttcgtccagaagccccatataatgacgtcttgccagtccttcgtttccagctgccacagatacacagttctgggtaaaatcagcaatactgctgatatactggcttaaaggaccgtcgcctctgtgagatccctggctgcttcccagacccacgcacacagacagaggtttctgataacgcagggcgcattttattgcataggaaatcccaagcataatatcatcctcctgaaacacctcagcctcaggaggaatcagatacagctctctgagatattccttggcaggcttcagctttacaattaccagctccgcctccggcgctgccccggaaacgccctcttccagattcctgtttcccgctgctatggaagcaagccgtgtcccgtgtccgttaatgtctgcagaaggaacgatttcctgcggattttcggactgcagggctctgttgatctcctgccgggtaaaaacctgtccataaggcacttcctctgactcccctgaaggaaggctctgatcccagatgcttacaatccggctctggtttccatttcgaaatgccgaatgagtatagtcgatcccggaatcaataatcgcaatcaaagttccggctcccctcagcctcaaataaggatgttcatgaagccgattgatgcctgaggcattcaggccgccctgatccatatatgtataacacttgggaacggaagagtaagaatagctgttgatcacagattccggtacctgagaagccggtatatagatgactccaaaaagctcattgataatctgaaagctcctgtccgactcatagttgacagctccgtcaacattgcggctataccggataataaagttctgatagctttcattctgggcaggaactacctgtattccatcaggtatttccctgttttcttccggctgaggaatcacacctgccagttcctctgtaaaaggcagtcttgtttcctccacagtcagatttttctcttctgtccataatccgggctcatagtcttcttttttcagcatatcttctccagaacactttttatcagcctatgccgttcttcttacaatatgtgtaaaaaaagctcccgcagatctttctgcggaagcctttttacacatgctgtcagccctgatttaacacagaacggacatgttctacttcttctctggttgcttttgcagccggtacataatagccctttgtcctggcaattctgtaaatctcttcctgagacatctcgcactggttacggatctgcttcagagtctgcttcagttccggattctctgtctgaggaatcatttcaccataacggacaagctctccgttaatacctgccagcgtatctgctaccattgttttttcgttcatctgtgccacctcctactgtaaaaactgcataagctgctgctttgtctgctgtgcggactgcgcagatttctggaaaaactgttttacttccatatcctctgctttctgtgcatagtcctgcattttacagtgtgtggtgtcaaatccgccgatcaggtgacgcagattctgtaaatcaagttctgaaatctctgtcatgatactacctcctcaatattatgttacaaaagatagtatctcagaaaatcagatttttattcgccgatgagccagttgtacatttcctcatactggcttgcagaatgaccccaggagaaatccgccgccatagcgcggtctaccagcttgttccattctctcttgttgtcatagaatactctctctgcatttctcacagtgtccatcatctcatgggcattatagtttcggaagctgaatccggttcctgttccctcaaactcattgtaaggctgaaccgtatccttaagcccgcctgtttcgcgaacgatcggcagtgttccgtaacgaagactcatcagctggctgaggccgcagggctcaaacagagacggcatcaggaacgcatcggatgctgcataaatgcggtgggacatcggctcgtcataatagatctgagcagaaacctttccgtggtacttccagtcaaaatgacggaacatattttcgtagcgctcgtctccggttccgaggatcacaaactgaacggcatcctggcacatttcatccatcacataggcaataagatcaaagcccttctggtctgtgagacgggatacgattccgatcatcattacctttggatcaacctcaagtcccaggtctttctgaagctgaagtttattttttattttttcctttcggaaattacgggcgttgtaattctgagtgataaaaggatctgtttccggattaaatacatcatagtcaattccgtttacaattcctctcaggctgttggatcgggcgcacatcagcccatccaggccctctccgtaaaacggcgttttaatttcttctgcgtatgtattacttacagtagttaccgcatccgcaaaaacaattccgcccttcaggaaattggcgtctctgtatgcttccagtttatctggagcaaaataataatcagaaagacctgtgatctcccttactgtttttacatcccatactccctggaatttcaggttatggatagtcataactgtgcggatccctctgaaaaattcattctgctggaaagaatcatgaagatacacaggaacaagacctgtctgccagtcatgacaatggatcacatccgggcgaaaaccgatcacaggaagtacggaaagaaccgcttttgagaaaaatgcaaatttttccagatcccacggagcgctgtcataaggctttggaccgctgaaataatattcattgtcaataaagtaaaactgaatcccatcatactgcatctgcataatgcccacatagcagttcttaaaaccaagatccatataaaaatgggtcacgtattccattttatctttccattcctgcttcatgcaggcatatttcggaaggatgacacggatatcaaaatagcgtttatcaaaatatttcggaagtgctcccgctacatctgccaaacctcctgttttaataaacggtactgcctctgatgttgcaaataaaatccttttcatctgtaaatacccctccttagtggcttgaagttatttttattataccccaattcacttttatttaaaagagtgttttttgtattccagccgaatcttgtctgcgatcagggcaataaattctgagttcgtaggcttgcctttgcctgtgcttaccgtatatccaaacagctcgtcaatggtgtccatcttgcctctgctccacgccacttctatggcatgacggatggcacgttccaccctgcttggggttgtctgatgtttcttggcaatggtaggatacagaaccttggtaatagaattcagcatttccatatcattgactgccaggataatggcatctctcagatactgatatcccttgatatgcgcaggaactccgatctcatggatgatatttgtcacatctccctccagattatgcgttccgtaatccgccttttcttcctgcactgcctgacgcagaagcggctcacggtttcttctgtctccaaagcggcgcagatgtttgatccggttcagaagcacctgattgtcaaaaggcttcagcatataataatctgctcccagattaaaggcatcctctgtgatcctttcctgccccactgccgaaaccacaataaaagacggcagtttctttaccgtctgatcatggctgcactgttccataactgtaagtccgtccatcttcggcatgataatatccaggatgactacatccggttctttttctctgatgatattacaaatttcttctccgttgtgcgctttccccaccagtttcagatcatgatcctcttcaatcattcggcccagtacttctaccattttctcgttatcatctgcaactgctacatttagtttctccataagaccaattccctcctcatttttcacagccaaccttccacagctgtggtgaattttcgtttactctttcatgtcacagctattatagtagaacatcacaggcgaaatcaagccgaaactgggtgaaatgccggtttttctttcgccttctttcgagatttaagtacattttaccccataaaaccacattcccgcctggttttaattcctggttttgtgcagttttatgagggtttccgctgttttgacctgttcttctatttttctacatttcccacaaaaacaggttttctgtcctgtttcctgtatctgttttttctgaagcgttacttgttttttatattttccagcatggtctctgcaaaaataccatatccgcttgttgaatcctgtacaaatacatgtgtcactgctccggcaaatttccccttctgaagtatgggacttccgctcattccctgaacaataccgcctgtgatctccagaagctcaggatctgtcacatggatcacaaagcttttgtttgtatcttcatggttcatgtcaatcctggtaatttccgcgtcatattcctttacgcttccatccacacagcagagaatggacgccgatccgacttccagttcctgtttataagccacttctgtttttttcaccggaattccggctcttctgtcataaaaagaaccgtaaataccatttttgctgttcgtgtcaacagcgcctataatctggccgggttcatagcgtatgagcccggaaagttctcccggacttccgctctttcctttctggatacccaggatctccgcctgatataacgcccctttgctgatatgaagaagctcccctgtatccacatcactgattccatgacccagggcgccgtaacggcctttttcgtccacgaaggtgagggttccgatgccctgggtattgtcccgtacccagatacccagcttgtattctcctccggcatcctttacaggagtcagtgacacaggaattttttctccgtttcttataacatccagaatcacatcctctccgtccagaatttccagatcctccatcagttcctttttgttgcttaccttctgttcattaaatgccacaatataatctccgggtctgacaatattttttgccggctcccttgcagttcctccttcacacaggatctctcctgtatcaatgatcaaaacgccctctgtttccatataaattcccactgtacttccgcttacatacacagaaccggcctctgcgggagtcactttgatatccttaaatggtatcattcccagaagtctgcagggcagcagataactgccttctccggacacagtgatcgcatcctcaaattccagcagaggatgctccagaagctcctgcacctcatgggcactgctctctgacacatgtatctcatcaggaaccttgcggtccatataacggtatcccagccagctcatagcaagtacatccagcccgagacaccagaaaagaaattttctgtatcttcctcttctgttcattctgtcacatcctttcgcataataaaaaagagagaataacctcttctgtcatcctctcttattatgcggtgaatatttctatttcactcttgtatttttatgtacttgtgccaattctttcatttccattgcatttttgagaacggcctccgtgatctccgctccgcccagaagtctggcaagctcacgaaccgattccctttcaccaaggggatggatctctgtgatcgtctcgcttcccttctgatgtttttcgatctcaaaatgagtgtctgccattgccgcgatctggggaaggtgcgtgatgcacagaacctgatggcagcttccgatgacagccattttttcggataccttctgagccgtccttccactgattcctgtatcaatctcatcaaagatcagtgtttcaatctgatctctgtctgcaagaatcgcttttatcgccagcatgatcctggacagctcaccgccggaaacgatccttcccagaggcttcacactctcgccgggatttgtggagatttcatattcaatgctgtcatagccgttatctgtaaactcctgctttctctgaaaatcaatccggaattttacatcaagaaagttcagatccctcagaccttcaataatcttttctgttaatgtcttactgtagtctttcctgatttctgataaaacatacgaatctttttccagctgctcttctgcttttttcagattttgccgggcttccaggaaattttcttcatacctggcaagcttttccagtttttgctgctgtgtattctgatattccaggatttcctctatggtacgtccgtattttgctttcagcccgttgatctgatccagacgtttttctgtctcataaaaggtttcatcatcaaagcttaaatcctccacataggaagaaagctctctgttaaaatcattgagaagcccgtcgatctcctgaagagtctctgccatagattccagctgcgtatcgtactctgtcacccttaaaagctcccgtactccggttccgaccgcctctccggccccctgtccggaatcatacccggtaaggctgtgaacgctctgcagggtttccagaatcagctttccattgttcagcctgcggtaaagcgtttccagctcctcgtcttcacccggcactaaatgagccttctcgatctcactgatctcaaattccagaaatgccttttcacggtttctctgttcttcatctgtatccagttccttcagagcccgcatatatttgcggtattcctcataggactgtctgaccgcttcctttgccggacgtatcttttctcttccatatgcgtccaggatctccagctgtttctcctgatacaaaagagactgatgttcatgctggccgtgtatatccagaagacattctgccgccgccttcatctggcctacggtacaggtttcaccattgatcttattaatgcttcttccatccataatcttccgtgaaagaagaacctgtccctcttctgtaaaaattccaagagaattgagcgcctgctctgcctttttgttttctacctggaacaaaagctctaccaatgcacaggaagctcctgtgcggatcatatctctggcggtacgtccgccaaggatcagctgcatggaaccaagaagaaccgactttcctgctcctgtctctcctgtaagaatgttaagccccggaccgaactctacctcaatgtcctcgatcagagcaagattttttacatgcagatgaattaacattttctcgccttcctatttctgcaatatactttttaaacgttctgccacactggaagcctcttccagtgttctggccacgcacatgaccgtatcgtcgcctgcaatacttccaagaatttcctcccagttcagggcatccagagcagccgctacccccattgccatgccgggaaccgtacggatcaccagaatgttctggccctgatcaatggtgagaagagcgtcatggagcactctggtatatttttctcccatctctgtaggaagctcctgcaggatcacatagcgggattttccgtctttgcctgttactttcatcattttaagggcacggatatctcttgacaccgttgcctgtgtgaccttgaaccctgcctcgttaaggcgggatgcaagctcttcctgcgtatcaatatcatactgctggatcagttctttgattttttcatgtcttgctaccttcacaatatccctccgtccggtgccttagttatcgcgcattttctgcctcagcacttctacaaagcttaaatggttcagcttcagtatcctgcagcttactgaagccttttttatgataattttatcccctgttaccattgggatcaccgtgtctccgtcaaaagaagccagacctttttcctcattctgccttcttccctcaccaatctccactgtgatcacatcctctgccgggaaaataatacttcttgtattcatggtatgaggcgctatgggtgtcatcagagtcatcgatgcatccggagacaccaccggtccgccgcaggacagactgtagcccgtagatcccgtaggcgtggaaataatgataccgtctgcattataagaattcagatattcattatttacataatttttaaaccggaccacccttaagggtccctctctgcagatcacaatgtcattaagagcaacatcctcgccaataagctttccgtctctccacacgcttccggtaagcatcatccgctcttcgatctcataatcatctgccatcagctgatccagagacggataaatggaatttttgtccacctctgccagaaatcccagagttcccagattcattcccagaagcgggatctctctgtggaccacatctctcgccgcctgaagaagggttccgtctccgcccagtacaagaatacactgagttccctcaggaatcagatccggatccgtgtagtggaattttcctctctgcctgcgttctgcctgctgtaccctgcattcttttccatgagaagtaagataggtctctatttcttccgtcagcttaaaatccctgtccttggcatcgtttgtaataatataaaacctgtccatagcatcccttccctaatccagctgatcgtgagcctggcgcacgatgttctcaggctccacttccggtgaggaacctgtaatagttccctcaggctgctttttcagatgaagaagatattcaatattcccttccggtcccttgatcggtgaaaaagaaaggtgacgcggttcaagggcaatggactgcgcatatgcgattactttttcaatcacctcaaggtgtactgccggatcccggacaacaccttttttccccaccttttctctgcccgcctcaaactgcggcttgatcaggcacacgatctctccattctctgtaagaagatttcttacaggaagaagaaccttggtaagggaaataaaggacacgtcaatggaagaaaagtccgccggctcctgaaggtcttccggaaccacatacctgatgtttgttttttccatacataccacacggggatcattgcgaagcttccagtcaagctgtccatatcccacatcaatagaatagacctttactgcgccgttctgaagcatacagtctgtaaatcctccggtggaagctcccacatccatgcagacctttccgtcaagagtcacctcaaaatgattcatggctttttccagtttcagccctcctcggcttacataaggaagggtatttccccttacctcgatcttaaccgtctcctgaaacatggttcctgccttgtcttctttctgtccgtccacatacacatccccggacataatatatgcctttgctttttctctggatggcgccagggcccgctccaccatcaaaaggtcaagtcgtttcttcatttctgctccttatacccgtcctctgctgttttttcttcctctaattcattttctatggcgctgaagatttctgccggagacagaccgatcttagctctcaggctgtccacctctccatgctccacaaagcggttccagatggcaatgggaagtacccgcgtttccggatggcaggcttccatataaactgccacatgttcgccaaaaccgccgctttttacattttcctctactgttacaaaaaggctgtgatcctttgccagctcatccagaagcccggtatccagaggcttgacaaaccttgcgtttacaaacgttggattctctcccttggctttcatttctctgtacacctgctcacatacttcagtcatgcttcccactgataaaatcgctgttttttctccccggtaaagaatctcgctttttccatactggacaggactctgaaactcttccagcccctgatatgcgcctcccctgggataacggatcgcgcagggacctgccatatatgcggaaaactccagcatttttgacagttcccaggcatttttcggagccatcactgtcatattgggtatcatggtcagataagacagatcaaagcatccctgatgggtttccccgtcagctcctacaagtcccgcccggtcaatggcaaaaatcacgtgcaggttctgcatgcacacgtcatgcacgatctgatccactgctctctgcaaaaaggaggaataaatagccactaccggaatcattccgcccagagcaagacctgctgcaaatgacactgcatgctcctctgcaattcccacatcaaaaaaccggtccggaaattcctttgcaaatcttttaagcccggtcccttcccgcatagccgcagtaatacaaaccagctttttctgctctttgccaagagctgtcactgtatccgaaaaaacatctgtataggtaaggcttttctttgctgacaaagactttcctgtttttatgtcaaaaggacctgtaccgtgaaaacggtccggatgaacacaggcgggcgtatagcctctgcctttttctgtaagtacatgaacgatcaccggtccttctacccgttttgcctcattaaacagacgcatcatctggcgcatattatgtccgtcaaccggccccagataagtgattcccatattttcaaacaacatgcccggaatgatcagctgcttgatgctgctttttgttttccgcatggtgtccacaatagccggtcctattttcggcacttttttcagtgtttttgtcacattgatcttcattccggtataggactctgctgtgcgcagcgcacttaaataggaagacattcctcctacgttttttgatatggacatattattgtcattgagcacaataataaaattcgttttcagccctgccgcattgttcatggcctcataagccattccgcctgtcagagcgccgtcgccgatcacagatactacccggtaattctgtcccagaagatctctggctcttacgtatcccagacctgcagaaatagaattggagctgtgacctgcgtcaaaagcgtcacagtcgctttcttttctttttggaaaaccgctcatgccgccttcctgcctgagttttgcaaagccgtcctttcttccggtcaggatcttatgggtatatgcctgatgtcccacgtcccagatgatccggtcctgaggaagatccagcacattatgaagggcaagcgtcagctccacagctcccagatttgacgcaagatgtcctcctgtacggctgaccgattctattaaaaactgtctgatctcttctgccagaagcggaaaatccgccagcgcgatcttgtgaatatcattgggcttattgatcttttccaacatccttcgtgtccctctcttacttcctgcgccctgccatttccctgaccagagccgtcaggaattcattttttctgttcagcttttccagagaagaaaccgcgctttcagaaagcgcttctacctgtcgggacgcctcctctgtaccgaaaagtgtcacatatgtaatcttattgttcttttcgtcactgtgaaccggcttgccaagctcttcgcttgtagaagtcacatcaagaatatcatcccggatctgaaaagccagtccgatatctgacgcagcgctttctacaagagcaagctcctgttcatctgcgccgcccagaactgctcctgccatcatggaggcttccagaagagctgaggttttgtgtttgtaaatataatccagcatttccttgcttaaaggcttgccgtcattttccacatccacactctggccgcccagcataccgaaaatcccagtcttttctgccataatccgaagagcctgtatcacacgcgcatctcccggagcatgatcaaaagcccggaacatggtttcataggcataatttaaaagagctgcccctcccaggatccccatggcttccccatataccctgtgagcagtcagacgccctctcctgtaatcatcattatcaattgccggaagatcatcatggatcagagaatgcgtatgaatcatctcgattcctgccataaaaggctctgccagagcctcgtctccgtcaaaaagccggcagcactccagaagaagcaccgggcgcagacgcttgcctcctgcacacatactgtaattcattgtctctgccatggttctggcaaaacctttttcttctggaagccagcggcggatcacttcttccgcatgatccgtccgttttttcagttcatccttaaaattcccgtaatgttccatcttcatccatctggagcatttttttttctactgtgtccagcttttcgctgcagtattttaaaagctccattccttctttataaaagcggaacgaatcttccagagaggtctcgctgtcctccagcctttctgccagttctcccagcttttcaaaggcttcctccagggtcttctctttttggagatccgtttcctggttaatcgtctctgtcatgtttcccatgtttcctttctgattcctgtaacctcagcttcgatcacaccgtctgtcacagaaatttccatccggtctcccggctttatgcctaccgttgttttgactgccctgccccggctgtccgccacaaaagcgtagccctggctgagcttgccaaggggcgaaagtcctttataacgttccagataaagccccagcacatgacgtttttcctgaagcttccacttcatcccgtctctgagggcatcctcataatccagaagaagctgtcttctttccctcagcctgctttccggacttaaatactgaaatctcatctgaagctgatccagacgtaaacgctccagattcagctttgcattcatcccccggttcagacgctcacggaaactggcggtattctcaaccagcttcccatactgagccacagccagctctgctgccgctgacggtgtaggcgctctcagatccgccacaaaatccgcaatggtaaaatctgtttcatgtcctaccgcggagatcacaggcgttctgcagtcaaaaatagcgcgggctactttttcttcattaaaggcccagagatcctctatggaacctccgcctcttccaacaatcattacatccacaccggcttcatccagcatacggataccctttacaatactgtccgcagctccttctccctgtaccagtgccggatagaggatgatctggacatacggatttcttctcagagaaatattgcggatatcctgtatggccgctcctgcaggcgcagttaccacacccagtcttcggataaattccggaatgggctgtttatattcctgggcaaacattcccatttcttccagttctcttttcaaagcaagaaaacgttcgtacagaacgccttctccttcctgggtgatctcctttgcataaagctgataacgtccgtccctctcgtaaacgtccacagctccgcccactaccacctgatctccgtctttcatgcggaatgccagtccgcgcctgtgtccggcaaacatcacgcaggaaagaactcctgtctcatctttcagagaaaaataaatatgtccgcttgggtgatatttacagttggaaacctcaccctttacatatacctttttcaggacaaaatcctgaaggaacatattttttacatagcggttgacctgacctacggaataaactcttttcattttcagttcttgctttcttcagatgacggctgttccttttttttctgatttttgctggatctgataatgatctttgcctggtgggaaggacgatgtgttctgcgcacaggaccgccctctttctttccgcttgcgatctttccaaggattccgtttacaaaggaaccggaatcttctccgccgaaaagcttggcaagctctactgcctcgttgatggcaactcctaccggaatctcctcatcaaatttcatctcataaaaagcaagacggagagcagtcaggtcaaccctgttcattctgcttgttttccatccctggctgtattcatttaattcctgatcgatttcttcaatatgcgcaagaatatcatcgtatttcttcttcatgacagcctgctcttcttctgtcagctcctccagactgtcaaagtaaagagaaagctgctccggcatttctccctcttcattaaactgtgtcataaacagcagtttaaaaatatgttctctctgttcgtgtcttcgcataattcctcctcatatagaaaaaaggaaagggttactttcctttttcgttctccatatctacaccagcaatgcggatatttacatctgcaacctcaaggcctgtcatattctcaatagatgtctttaccttgtcctgaaccttccggctgacgtccagaatattttttccgaaatcaatattcagtgtcagatccactgtgacaacgccctccagaacagtaacctttacgcccttggacaggttcttcattccaagcttgcttaccagttcatttgtgatgtttccgcccatggatgcaacgccctcaacttctgtagccgcaagtgccgcaatgatcgtcaccacttcatctgcgatctttacttcaccgatacctcctacatcctgtattttataggttgttcttttttctgccataataactcctcctaaggattcagaatcagatactccggttaaggaacagactttttcatgtttcctctgtccctgttaataagcttagtatatcaaatttttacagaaaataaaagcatttattatttatttcattttgtatcggttcttctgataaagtttttatttactgaactctgtcagtacaagatccggattccggtcctgagtcatgcccacgctccatgcatttacaaacagaagcagaggatttcctttcaggtctgttacctttttcatatctgaggttcctgtgatctttgccacatccacttcatccttattggcgatccaccggatatgctcataaggaagattttccagacggatctctacattatattcattttccaggcggtatttcagaacatcaaactgcaggacacccacaacgcccacaatgatctcttccattcctgtattaaactcctggaagatctgaatggcaccctcctgggcaatctgattgattccttttacaaactgctttcttttcatggtatcaatctgacggacacgggcaaaatgttccggcgcaaaggtagggattccctcaaaggcaaactttcttcccggtgaacagatggtatctccaatggaaaaaatgcccgggtcaaatacgccgataatatctcctgcatatgcctcgtcaaccacatgacgggattctgccatcatctgctgtggctgcagaaggcgcatttttttgtctccctgtacatgatatacctcctgggaagcgtcaaacttgccggaacagatacgcataaaggcaattctgtcacgatgagccttgttcatatttgcctggatcttaaacacaaaagcagaaaaatcgtcagacataggatcaatctcttcctcatctgcaatacgcggaagtggagaggttgtcatggacaggaagtgctccagaaaagtctccacaccaaagtttgtcagcgcagatccgaaaaataccggagtcagctcacctttacttaccagctcctgatcaaaatctgcgcttgctccgtcaagaagctcgatttcttccattagctgttccttctgatcaggatctacgatttcatcaagacgggagtcatcgatgtcgatctcctcaatgattccctcttttgttcctttttgtgtatcggaaaaggtcagcaccttatgggtgtttctgtcataaacgccgcggaatttttttccggaaccaataggccagttaatagggcaggtcgcaattcccagttccttttcgatctcatccagaagatcaaaggtatcgtttgcgtctctgtccattttgttgataaatgtaaaaatcggaatgtggcgcattacacagaccttgaacagctttcttgtctgcgcctccacgcccttgcttccgtcaatgaccatgacagcggaatctgctgccatcagggtacggtaggtatcctccgagaaatcctgatgtcccggtgtatccagaatattgatacagtagccgtcataatggaactgaagcacagaggaggttacggaaatacctctctccttctcgatctccatccagtcagataccgcatggcgggcagttgcctttccctttacgcttcctgccagattgatggcgcctccataaagaaggaatttttctgtcagtgttgtcttaccggcatccgggtgggaaataatggcaaaggttcttctcttttctatctctttcgcatacttggacacgtttaagcctcctgttttctattcatacaaactcataacatactcacacattctagtatacaaaagcctgcactgtcaagagcaatcggacaggaaaaatcccctctccctgccggaagaggggcgcctttttctattcatccggataccggtcagtcataaatcccttctgtctgtattacatactcgtctgaagcctctgccgaggtttcctgctcctcataatcctctccggatcccgatgcttctcctgaatcttctgtttcaccgatctcctcagcctctccgtttgtttcctccagctcctcttcaccttccgggacagcttctgcttcatcgctgctctgactcagaggtgtgatcacaatattttctgctgcgatgccggtctttctttttacaatatcctcgatctgcgccctctgcgcatcctccagagcgctgtccggcactacaatatccgctgtctccccggtcagattcacaaccacattctcaaatccttttgcttccagaagaagctctgccgccgcttctttttccgcaagctcagtcatggataccatggtattgatggcttcctgctttttctcctcactgatatcggtatttccaatgatctcctgaagctctgccttgttctgagagcgcacctgctctctggaaagctttgcctgggctgcaaaatcagaagctcctgtaagtacggcttctccgggagttcctgtagttgaaagatctccctggccatctgccccgttctcatccagaagggctgtttcatctgtcagatcatactctacctcctccaaaatactgctgctgtctgtactggcctctttatccttaaatcccagatctacatccgcaaaattcaggtatccggctactgcgatcagaattgccagcgaggtgatgatcacctgattctttttcatgatttttttcactttactctcctcatttcattttcattatttttattttatgggcttcaatctgaaataatgccattacagcctgctgaatattctgcacggtaacagaattatccgccccctctgccgcaatcagcacacctgtcacttccgtgttttccgttccgtaaaatccctgttttccctctccggtcatcagaagtacctgcacctttcccacaccttctgtattttccagaatggattccagctttgcctccagaagtgttctgtccccctcacagctttctgtattttccgtaagatcctgcttttcctctgtctgttccttactgtctgataccggaagcgcgattactgtcagaagcattcccagaagcagaagaaccatccactgctgccccgtcatttctgtcagtaaggatcttacagtccttttcttcgattccgaagctcttcctgaggtcatcccgaatccccctttcctgttcccgggtcagctcctgttttacagtcagtactgcggatatccgctctccttctatatgtacggcagtctcagaaggatttattcctgattcttttaacaattcttcaattttagaagaaatctcattttcgtatccctgtttcagataaaaagtctgaagctcttctgcttccatcctgtccatccttttctgttcctgataaaaggtatctgcaaagccttccagaagctgcccgctttttccaaatacagcaaacacaggcgtgcagagcatgtagatcagaagaagtcccataaacgaacgcacatagcgttcatatttacgatcaggaaccagctgaagaactgctgtaaaaaacagataaaaaactgcaagacttttcatccactggtaaatgtcctctctcatacgccgcctccctgtattcctgccataatgatcagaaaagtcagaatacaaagaacctctgctgtaaaaaggattttcagcaggatctcaaagccttctcccatggtagacagacattccaccatccgcttatccgatatcggctgagatactgctgccagaaaccggtaagttaaagacagcatcccataatggatcacaggtcctgccccggcagccactgttgccagaaggataagaactccaaggcagttgcgtacaaggaccgcactggtgatcaccagctctgttaccatgttcacagcatttccaactcccggcaatgctcctgccgcttttccgatcacacttcttttcagagaatccataaccggagccaccagcccccggacaacctgaagccctgccacaaggcccagaagagtttttagtgcccagctgatcactgtttttaaaaattctgcaaattttcccagcatttcttctctggacagatgatttaccagacgcagaagaacataaatctccgccgcaggtaaaagaacattcagaagaatccactggatcagccacaccagaagaagaactccttcataaaacacagctgctgacagagctccggaagatgccgccactgtcataaaatatgccggagacagcgccttcataaattccacgatccaggagatcgtatgatgcagcgaacgtgttttttcataaaaagaatccatcagaagcgtaaacagaagaatatacaccacataaaaactgacatctcccacctgtccgttttcaaacacagaagcaaaatttgtaaacactgccgcaagaatcaccagcaccagaatttttgcaaacagctccctctctctctcaaaaccggaaaaaaaaagaccgcgcagaaattcctgcactgtctcttttgaaatcgcttcttccccgtttattaatttcttcagagcttcctgaaaagaaaagctttctgtccccaaaagctcgtccagcatcctctgaacctgaccgaaatcaagctccgaaagaagctccccctggatctgctctgccgtatcagcctcttctgccccttgtacgacttttgttccgcaaaagatgataaatgcggtgcataaaacaaaaatcccagttttataaagcctcttcatacaaaaaacttctggatcgtatccagaagcgccatcagcacaggaatactgaggaccataatagacagcttacagaacagctcgatctgtcctgccgttgcctgatgccctgcatctctgcatattcctgcagaaaactgtccgatgtaggtaataccgatcatttttatcagcgttgccagatagccttcatccagaggaaggctgtctttcagccgatccaccgctgaaaatatatactctatctttcctgctgcaagccccaggatcataatcccgattcccacagttacaaaaacagcgtattccggctttgttcctttcagaaaaaatccaagcattacgccgcatacaccaagaagagaaatctttataatatccatgctccgctccttccgcatctgctccgtctacataacaaaaagagtctgtatactttcaaacagatcgtatatatagggaacgatccagaagagaaccaccagaagtccggcaagacttaccagaaacgcctgctcatctctgccactgtgtttcagtatctgagaaagaacagaaacaaggattcccactgccgctattttaaaaataataccgacttccaaatcgtcctcctttcccaagctctgcacagttttcttcctaccacaaaagcactcccagaaaaatccctcccagaatccccagattccggcatagtttctttttttccggaagctggcaggccagaaaatccagcctcctgcacagctcttcctcaaaaatatccagctgccttagctgcatttctctgtccagatagccaagcctgtctccaagagaagcgatcagttccatttcttctgcagaaaaacctgcggtccggaactctttttttgcacagtcccggaaaatctgtccaagggtctggccttcctgacctttcagcctgtccgcaagactctgaaggaactcctggtacataccgtcaaacttttctgaaatttccagaaacgcctcaggaaaacagctattgccgcagcgcactgtcccctttaaacatgaggtcagccacaggaattttttcagattccgctctctttttgtaagctccatactctttgcagtccccatgccggtccctgcaataaaaatcatgagaatgcctgcaaatttcagcatggaactccccttccgtcaaaaatccccctgataatgccggctcttttttcttttcccagaacaatatatctgtcaaatactcgcatttttttcagccctgcaaaaaagggtgtggcaagcacagcttccacattctctccatgggcagtggcgatcagtctgcacccactgtggatcaccgcttccactgcgcggaagtcctcttcctttccaagctcatccactgccactaccgccggggacatggctcgtatcagcatctgcattccctgggctttcggacagcagtccagcacatccgttctcattcccaggtcattctgggggatgccctgatagcagcctgccagctcgcttctctcatccaccacgccaaccgtaacacccggaatctttccgaagccattgctgagctgtcggatcacatcccttaaaagtgtggtttttccacatctgggcggtgagatgatcagtgtatgggctgtccatttttcttttcggatatagggcattacagcgtccgcgcatcctggtatctgatgagccagacgcacattgatacaggaaatatatttcattcccctgatccggtcgccatccaggatcacttttccggtaacccctaccctgtggcctccctgtacgctcatatatccctggcgaagttcatcctcataggcgtacagagaatacccgcttacgtattccagtgtctctttcagatcctctcttgttaccacatacggctccctgccctttgttcttaaaaaacattcgcctttatcataagtgagaaacagcggccttcctgcccggagacggatctcgtacaatctgtcgtaatcgatctccgtctggacaagaagccgccggatatttccggcaaacagattctggatctgactggcctccattgtcctcccccctctttacacataatatatgaggacaatctctgtttcattaccggattttacggaatgcttatttccagatgttcccatctgagctccagagggttttctgaccacacagctccgctgtatcccggctccatttccagcagcacagaatttcctctgtccattgggatggtacggggatctctggaaaatccctcgccgatccatttcatatatgcttcacgaagcacccactggttatagaaagcttcctttatgtgatcagattccagtatttcgtgaaacagggataccggcaccagtttctgcaggcctttttcataatccagttctctgtgttcctgaatatcaatccccacttcctcgcctgcaagaacacagaccacatactttccggaatggctgatgttataatgaattttcggctgtaatgtaaaaaacggtttcccgtgctcgccttttgccctcggctcaaaagcaagcttccgtccatactctttcagaagcgcctcttcgagaagcttttctcctgtcatatgtcccatgtttttgtgctcatactgtgggggaatctcggtaaaataaatgactgctttcatactcctgcctcctttaaaaatctggacggttctctgtccttttcgtactgccgtttcacatagcataacgtgagttttttctttgcccgggtcattccgacataaaacagtcttctctcttcttccagagccggctcaagaactgcttttttataagggatgctgccttcatttacattcagtatataaacccggtcaaattccagcccctttaccccgtgcatggtggagatcagaactccttctgtctctttttcctgcttctttgcctgttcattcagtctcttcgtataatcttctatgtaagtctcccattcttccagactgtttattccttttgcgctttccagaaggcggtccaggatctcacttaattcctctggttttattttacgataacgtgcatattcatgcaagtattcttcatatcccataccttttctgataaaatttatagccgcataagggggcagtcccttcagaatcctgagatgggtttccagggtggtgatcctgtcgcacatccagtccttattcttataaaattccttcagctgctcaaaagacagttcatttgaaatcgccagagcctcccgtgaaagataacggttgggacggttcatgatctccagaaaattctttctgcagttctgcccggctgccagtctcatatatgccatcatatttctgcatatccagtgatgaaaaagattgggcagagtttctttcatggcaaaaggtacctgacgctccatcagagctcccacaaggccttctgcctcctgatttgtccggagaagtattgccgtatccttcagatcatcgcctgcatccagtctcctgcgcagctcaccggtaatctccatatattcttctctgggattgggaaattccagaatacttaccggttcgccctccggattgggagtggacagctcttttttaaaacgtgttttattttctccgatcacattcatggctgatccaaggattctttttgtacaccggtagtttacatttaagaccaccgtttctgcttccggataatcctttgtgaaattcagcatgatctccggtcttgccccccggaagtgataaatggactggtcatcatcccctacaataaacagattgttttccggctttgccagaagcctgacaatatcatactgaagctggttgatatcctgaaactcatccaccagaatatactgaaatttattctgccaggctttcagaatgtcctgtctctgctgaaaaagctcatagcagtacaaaagcatatcgtcaaaatccagctttcgccttgcggtacattctttcctatatccctgatatatccggcggaacacctcatccggacagcaggaagaataataatgctccagagaaatccggtttccttttaccacactgatctcttttgccagttctccggtaaaatctccctcttctgcaagctctcctgccagctccagggtaagttcttttaaaatactattcttttcttcctctgacagaatatttgccgcagtaaatccatatgcctgttttaaaatagcataaaataccccgtgaaaggttccaaacgtcaccgggctgtgctcctgtccggtaaattttaaaaaccgttccttcatttcctttgccgcggccctggaaaatgtcacaacaagaatggaagccggggatatcccacattcttttgtcatatatgcaattcgttctactgttacggaggttttccccgatccggggcctgccagaaccatcatgggtcctgacaggtgggcgattgcccgtttctgagatggattacgtttcatataagtccgttcttagctgagtttttcaatggctgcttttatgcgcttcagagtttcttccttgccaatgatctccatgatctcagttgctccggcaggtgtcatctgcttgccggaaactgcagtacggagcggccacataacatatccgttcttgtagcccttttcttttacaaattcgcttaaagaagcaaacagaggatcatttgtatagtcctcctgagcttcaagtacaggaagaacctcttttaatacagtaagagcagtctcttctgttgttttcatttttttgtggcagtacatggaggaatcatactccggaacttcctcaaagaagtcgatcagagccggaatatccgggaatacctcgattcgtgtctgcaccattcctgcaattttatggaaattataatcttttttcagtacttccttcatataaggcagggctttttcataaaaagcttccggatccatttttttgatatattcgccgttcatccagcgcagcttctggatatcaaaaacagccggtgatttgctgatgtggtgatagtcaaaggcttccacaagctcagaaagagaatagatctctctgttttcctgagggctccagccaagaagggccacaaagtttacaatcgcctctgtcaggaatccctgatctaccagatcctcataggaggaatgtccggaacgcttgctgagcttctgatgttcctcgtttgtaataagaggacagtgtacataaaccgggatttcccagccaaacgcctcgtaaatacgattgtatttcggtgcggaagaaagatattcgtttccacggactacatgggtgattcccatcagatgatcgtccactacgtttgcaaaattataagtaggatagccgtcagacttgatcaggatcagatcttccatttcctcattatttactgtgatatctccgtaaatcacatcatggaaggtagtggttccctctgtgggcatattaaaccggatcacatgaggctctcctgctgcaagacgtctttccacttcttcctttggaagcttcaggcagcgcttgtcataaatggaaatttcttttcctgccaccatgcgcttcatggattccagttcttcctgtccgcagaagcagtagtaagcgtcgccctgatccacaagctttctggcatattccagataaagaccggatgcctgacgctcactctgcacataaggtcctacgccgccgtctttgtccggaccctcatcatgaagcagtcctgtcttttccatggtgcggtaaataatatcaaccgccccttccatataacgctcctgatctgtatcctcaatgcggagaataaaatcaccgccctcatgtttggtgatcagatatgcgtataatgccgtacgcagatttcccacatgcattcttcctgtggggcttggcgcaaatcttgtccttaactttgtcataatctctctcctgttttctttatactatgaaattccctgagacatctctgcctcagggaatttagcgtcgccgcctgatacacggcaaccgtttaactcaattatgcttcgatgcctctgttcttcagatattcgatcacatctcctacggtagcaagatctgcaagctcctccgcaggaatctcgatgttatactcatcctccagtgccattacaagctcaaaaagatccagtgaatctgcccccaggtcatccttaaaagaagtttccaaattaatctcattttcatcacagcttaactgttctgcgatcatttttttcatttcttctaacattactatcttctcctttatcaaatatgctactttgatgtggaaagtatatattctgtacatctatttgtcaatagatttccacgattttctctttttccgggcttcgtctgccggttattccttacatgtcttgaaattttatctgccgggccacacttaacgccagacccatttccgccatcaaaaacatgatggaggttcctccgtagctgataaacggaagggtaactcctgtattgggcataagattcagcacaaccgcaacattaaagatcacctgcagcgcaatatggataaaaattccggttaccatcaggcttcccagcaagtcggaagcattctgtgcaataaagaacagccggtacagaaggtaggcaaacataagaagcagcatcacgcctcccgctattcccagttcctcacacacaatggaaaagatcatatcgttctgcgcctctggaacacttcccagcttctggatactgtttcccagtcctcttcccagaagtccgccggagcctatggcatacagagcctgaagagtctgatatcccattccgtctgcaaactcttccggccggagccatacaaggattcgcccgattcgaaagttttcgtttgtttccgggtctaccgtaagatacaaaaatattacgattcccgccacaagaaccacacccaccgccgcaatactgagaaacagctttgtgtttggatgagccataaaaataaggcctgcagtaataccgaaaataatgatagccgtactgaggttttctgttaaaatataagcaccggcagcaagaagtcctcctgatcctgccaatctcatacagcccttcagcgtttttacctgccgccccatgtttatgatcatataaggcagacatacaatcaccgcaattttggcaatctccgcaggctgaaactgaatccccagcttcagccagcgtctcgctccgtttacctcctgacccagtggagtaagctttaccagagccatcagaaacagagcagatacatataagattgtggtaaatctgccaaggatatggtaatcaatttttgatattacaactgccgcaacaatacagacagcgctgatcagcgcctgtttcttaaaaaaatacatgtcatcgccgtacttgacctctgccatgtaggaactggtactgtacagcataatcagaccaaagcaggtaagaagaatgatcactgccagaaggctgtaatcataataatccactcgtttccgtcttacggatcttttcctgccgtggcctgacagctttttctgctgtgctggtcttgccatgaaaacacctgtctctttctgtttcaaacaaaaaatatgtatcaagtgttcctattatagcagaatcctttctcctgtgcaagttttccggctttctctgccagacagcaaagctgcctgtttttctcgttcactggtccgaactcatttacacagcagatcacctgagcacattgttccatcgtcttcacagctttctgatagacttcctcccggatcagagaaaagggctgttcttctatcacctctgccgccagagctctggcaacctcacagtccacatcatttccgtggagaatacctgctgcaaaaggaattccagccctctgaagcttcctgtataccggaatacctgtcccgtttcctccgatcacaaatacctccggctttccttttggtctttccatttccagacacccgaacgcagcattgtagctccctgttgtaatcccataaagatgatgcacatattcagaactgaagatttcctccggagacccgtatttttctattttatctccatgaacacagatcacgcagtcagaaatcttctgagccagatccagttcatgaagagacatcagaaccgctgtttttttccgaactaccatatctttaagaattgccagcagctcaagcttgtgtctgatatcaagaaatgaagtaggctcgtccagtacaattacctccggctcctggcagatagctcttgcaagaagaatcctctgtctctggccgtcactgacggcggtaaaatccctgtccttaaactccagtgcatgaaccagttccattgcctcatgaaccttttcccagtcttcttctcccagaattcccagtgttcccgtatatggataacgtcctgttgccacaatatcctcacatgtcataagctccggccggatacgttctgtcattacaaccgccagtctttttgccacatcctttccggacatgcggctcatcatttcaccgtccaggtatactgccccgccaaccagtttcagctgccgggtcatactttttaaaatcgtggactttcctgctccgttagggccgatcagagtaagtatctccccttttttcagacggatctcaatatctttgatcagaggcttcccgtcataacctactgtcagctgctctgtttgaataaaatactcttccattatgcggacctctttctccgaatcataatataaataacaacaggtgcgccaaacaccgcagttaccgaactgatactgagttccgtaggcgcaaaggctgttcttgcgatcagatcacagaaaagacagaatactgctcctcccagaaaacaggctgggatcaccagaaggggccgggctgtttttaataaactttttaccagatgaggcaccgcaattcctacaaaggatatgggtcctgcaaatgcagtgacgcatgctgataaaatacttgacagaagaatcagagccacacggaaaagtttgatatttacgcccatgttctgtgcatagccttccccaagctgataagcgctgataggttttgacatcagaaataccatcagtaccgtaactgctgtcacaactgccatcatccgcacattttcccagttcatgccggaaaagcttcccatggaccagttatgaaggtttacaatattggaatcatctgcaaatgtgatcacaaaatccgtaactgcagaacagatatatccgatcataataccgctgataataagagctgacatctgttttacttttttcgcaacaagaagcacaaagcccatggagatcatggagcccacaaatgcagccagaatcagaactgccgaggaggcaaccatggattttcccagaaggaagatcataacaagggaaacgaccagctttgccccggatgaaattccaagaacaaagggactggctatgggatttccaaaaaacgtctgcaaaagaaaaccggatacagacagggcaccgcccaggataatcgctgccagtattctgggaagcctgatctcccagatgatattaagtgctgtgtcctctccctttcccaaaaacaggatttccataatctctcttacagaaatctcaatacttccggaattaatattccacactataaagctcatcagaagcaaagccagaaagccaaaggcgatccagtatctaagatgtagtttcttccgcatgtttctatccttcctgtttattcatcagaacctgccctcttatctgccggcctatttcagccggtgcatataagtcagagtgtccagactgccatcttctgttgtcagcatggtatggatatcttcgatcatggttcccagccccatagtatcctgaaaaagattctgttccgtacaccatacatttccattttttactgccttaaaatcattgagaagagagctttttgccagaagctgatcgatggtcgtcagctcaccgtcaatggtgctgttataaataatataatccgcatcctttgccccggcgtaaaattcttccatctgcatgttcatggtggaaagtgcgctgtcatcctctccaagctcatcaaaaatatattttcctcctgccagctcaatcattttcgccacatagtcattggattttcgcacatttgcagctcctacagaattaatataaaaaaatgccactgtctttcctgtatttttgctgttttccagatttttcaccttatctgcctgcttttcaaaaagctcctgagccggttcttccctatccagaagcactccatacagtttcagccactctgttcttcccaggggatgaggctcatagctggaatgctccacaagaaccggaattccaaactgttccagcttttccttcacttcaggcatatggtagatcatggtagattccacagcaagcccacagtttttgcttagaatcagttcataatcaggagcgctgtattttcctgcaaaagaaatacttccatcctccaaagctttttttgcctcttcaatataccagccgtctccatctgtgccggaaagactgatgtgatcaagcccgtccagcgcgcagaacagattcatggcagaggttgccacaaggtaaatattctgcaccggctgttgaataactgcaatggtttcatccagggattccggcgcctttttcccttccggcacaaccagaaatctgtccttatctgcaattgtgatcagagcatagccatctttataataatctacagaaaactgttctgcataatcaagttccatgctgtgatcgtaaacaagtcctgaaatttccagcggttccttctggccttgagatgcctggaccggaagaataccttccataaaaagcataatacttacaataaaacagattaaaatccttttcatatttattcagcctttttcacagattcagaatcaaactgcagggtatagtcgatctcatggggttcactcatggctacggtatcggcctttacctcaagggccgtatcaaaggctgcaaccggaatatcaaatacagaatttccttctgtatttaccatctcatacttctccccgtccacgatcatataatcgtaattgggactgctccaggtaatggttgccatggcctttccatctgaaatcttcatttccgccgggctctctaccgttgcctttccggatccgccctccagagccacttccactgtgtaatctccatcctcaagcttcagctcctctgctgtctttccttctgatgaaccgcctgtctcttcactgttctccgccggctgaggattggaaacacttactttatgatcgtaccacttgccttttttgccaagaagtgctacgtcaaattcttcctcaagagacggaaccggaatgtcaaagccatacacggtttctttatagccatcgctgtatgtaacctcatcctctgtaggctccagaaccttcgcgccttctttctgtgcatcctccgcttttcctgaaaacagatttacgatgctcttggaaacaagactgacatgaatggtcatttccccgttctttactgtcagtgttcccttgccgtcttttgcctcattcacatgaaacatgttgctgtctgtatcaaaatcagctgtgtaaataccgtctttcaggctgctctgactgtcctcaatcgcatctgcacagttaacttccctgacataatccagattttctatatattcagccagctccggctgatcctgaagctgttccgtataaattttaaaatgtgacgacccggaaaggggattctcatcctgaaatccttcctcaacatctgatccctggaaataagaatctttaaattcctcccaggcctggtctgaagaaacatataaaatttcttttacttcctttctttctctgatctgctcttctaccctgtcgatctgctcccgggtagctccttcatcaaaaaagactgtaatgggaatttcatctgcagccgaatattcctgtgccataacaggagcggagcttcctgccataactattgtgccggatatacaaagaatcattgccattttacgtttcataaccttgatctcctttcaaaataactgcccggaagttctgtaacattccgggcagattttttatccatatggttcttattcttctgcagcttccgtttctgcctctgctgtttcagcttctgccgcctcatcctctgtagctgcttctgttccaagggaatcaattgctgcttttgtatgatccacataaagctgttttactgcatcgattcttcccaggccggcaatctgagcatccacactgtcaaagctgccggatgcttcaaacatggatttccaggaatcttcttcacttcctgccatatcattatttgcatgatctccggcaactaccataagcggacgaaggattacttttttatatcctgcttcttttaccttttcgatcactgcttcgcaggcagtatcttccggctcaccttctacagtgccgataaatgcattcttaaatccaagctcctccatctgggtctgcatctggctgtagcttacctttgctgtatgggaagttccgtggccaagaaatacaaatgctgtgccatcctctgcagctgcttccatactgtcaaatcctgcttcctgaactgccgcatctgcaactgcctgagcaactgctgctttatcttcattaatcacagttgcatcatccccaacctcgccaagcataggctctgcaattgcaacggattcaaatttgtcctgatactgttcaagaacctctgccatctcgtcatattcagctccatgcatgagatgtgtaggctgcaccacaagattctttactccattttccactgcgcggtcaagagcctgctgcatattgtcaatcacttccccgtctcttgcctgaacgtggttgataatgatctgagcagtaaatgctcttcttacggcccagtccggataagcttcctgcaaagcgtcttcaattcctttaatgtcctcaacacggctgtcgttataggaggttccaaagcttactaccagaagctcgttctcgccaatctcatctgcattgcgtgcatcatctttggcagcgtctccggtgtccagtccaaagtaatccgggctggcattctcgccttccaccagctctttctgtgcatcggtaagggcatcccaggcttcttttgcagctttacagtcatcatctgttgtttctgttctttcctgaacataaattttgtcgatcagcgctgccacattgtctgctgcctgctgatctgcatctgcgctttcttctcctgcagcttcagtttcctcagccgcagcttctgttgttgtttctgtatcggaagcataaatgctggaggctcccatcatagaaacagttgttacagtcatcagtaatgccagtgcttttacagttttgtttttcatgtttttatcctccttttttacactgtgccggaatctgtccgctgtatgacagttttccgaaaaatgaataaaaatgtacggagaaaaactcttctgcaaaacaccgtgccattacctgaatttttatataaaaataaaaaaaccccttactcatggtaaaagggctgctgacacaattcggtacaaccaattactcgtgatttgggaccctcgtccccgtaccaatatcaggcaggtttcctggcttataattccacatacaaagcagccttcccagtttcccagtggctgtaaaaatacaaaatgctttgtactccttaaatacagtgacgagatcgtgcaggattctcacctgcttcccttttaaccggataaaaatccagcacctgatattctttttattcaattttctaaattataccactcttttttgccaaatacaaccatccgttcagaaaaatacgataaaacagagcaatgaggaagctgtttttccatcactgctctgccgtaaatattttatttcatatatttattcaaccaggtatataccttattctggcgtgttctgtaagcgccaacctgatttcctgtatctgttcttaacgcagcaagaatattatccagatttaccggtcttttggtttttgcaagaacacgggttacagctccatatcctccctgatgacggatattaataaacattccgactgatttcggttccgtaatacccagacttcttacctctttttccatttcctcaatttgtgtgtacattaactgatcctgacatttaatgcctgccggtgagctgataattttttcgattcttcctaaatatgctttgtcagaatatgtattccagtttttatttgctacatctttccacaatttgccgtccttatcatacttgttccatgttgcaggacttgaactgtgaattagttttaacagtcgctgtgcttctgttgcataccattgacctgctccaattgtaattgcatgttccgcaccactatttgtatatggaagagtcacatctgtatagtcctgattcccataaacatttccacctgtctccacaccataaagaatttttttcataacttccttctgtgcagaattatatgcaggatattcttttcccggtgttgttaccagattactttctattactttattattaattttgtaggatgcaagatattttacattgccaccgcccagtttatatgggcgaaccgtataaacatatttggtatccggcaataccgttttgtccacataggaagagtgatcttttgataaagttatcattgtcttccacttttccccggaagcctttcgatacacactgtagccatctgctctggagacatgattccaagatacggtaatctgtctgctggaatttgccttagcctgaattttcggcatttccggacgtgtagcgcctaaaactgcattgtactggctgtatacttccttgccgttttctttgcggtaggcacggactgcatattgatactgcgttgcagatacacgcttctgatccaaatagctggaaacattttttcccacagtagctattcttttgtaagactgaccattctcttttctgtatatagcataaccactggcaagacgcgacatatcccactgaatcctgattgaatatctcccggcttcctgtattttagtagtaaccctgctgttggcaatcgttgcctttaacgttaacgcacttaccggaacttctgtgcaaaaaacagttgtagccaacatgactgctgccagaagcaataccgcgcatttttttcctattgttttcattcaatccttcctttctcaagatgaatttcgaacttgtttcctaccggcagctctgatgccccggcccttcttttctattttaaggaaggattgaaaaaaaagcaagcattttttacaaaatattatgattttgttacatttttattacttcagtagcgttgtttctaacaggttcctggtgtttttatctttcatcaccaacaaagaacaaagccattgtgcccgggccggagtgagctccgatcactgctcctacataattaatgatctctgtctttacctgatatttttcttttattttgccagacaggtactgagcctcctccagacagtctccgtgactgataaatactgtgtcacaggaagaagcgcaggagccgatttttttatccatcagatcagccagttccagaagagattttttgcggccccgtacctttcctatggggatgagtttcccctcttcgtccacgtgaagaatcggcttaatgttcagcataccgcccagaaccgctgtcgtctttgacacacggccgcctctgtacagatggttcagatcgtctactgtaaaaagatgaacgatattttgcttatgctgctccgcccattctgccacggcatccagatcctgcccctcttcctttttcttctgtgccagatacaccagaagtccctgtcccagagaagcgctgagagaatctacaataacgatctttcgctccggatactcttccataagctcttctgctgcaatccggcagctgttgcaggttccgctcaggcctgaggaaaaagcaatatgcaaaatatccttttcctctttcagatatggttcaaacagttcttttgcctcttccgggttcacctgcgcagtggtgggcatggagcctgtccgcattttttcataaaattcaggttcatccataaagttctcatgagtataatgaactccatctattgtataactgagatacatgcagcccaccccatgttctctgtaatagctctccggcaggtctgcattattgtctgttgtgatcacatactttttcatattttcccctccatttttttaatcataacaccaggctgtctctgtatactccgaagtttccggtgctgctttctgttttatcataccattacagttcgatatgtgcaacaaaaatggaaaaagaactgacaatacttccatatcatagcagacaagtccgcttcagactccctcaatcctctgtctccgtttacagcaatatggtcaaagcaccttccgtaatagccttttgggtaaatatcagttatctgtttccagtaccttcagagcttcctgaagctgattatcctcctggtgagtgatttcctcctgattgagaagctctggatccagctttacctccacgtccggttttattcccacctcattgatggaatttcccttcggagtgtaataatcagagactgtaagctttaccgcgcttccgtcactaagggggcgaagctcctgaaccacgccttttccgtaagtaacagtacccacgatggtgccgattccataatcctgaaccgctccggcaaaaatctccgaggcgctggcgctgttttcatttaccagtactgcaaaaggcatatccaacggtgtttttccttctgatctttcctcgctacggtttccgtatttatcttccgtatatacgatcagaccttccggaagaatactgtttaatattgcacatacagaagtcagaagacctcccggatttcctctgagatctaccaccagctgctccattccctgatctttcagatcagaaaacgctttttcatactgatccggagtaacgtctgtaaactgagatattctgatatatcctgtctgattctccagcatctcactgaatacagaggggagctccacatctgtgatctccacagtcacctccatggcattctccacattctgtctgtgaacggtcagcaccactttttccttcccgcttccccgtatcatatccacaacctccgagacatccttttccgtaatgtctgtaccgtcaataccgctgataatatctccggccttcagaccggctttgtctcccggaccttcttcgtagcattccacaatccggacgcccccctcttcatttttctgcatcgcaataccaattcccacataggcgcccatagtggacgaattttcctgctgatattcctctgctgtataatatctggaatacacatctcccagtccatatacaaggcctgtataaagcccctctgcaagtttttcctgatcgacttcacctaaatattcttcctcgatcagatgctccagatacttcagctttcccacatgctccgattcagaaagaactccgtcatactgagaccggtatcccaggtatccgcctgcccccactgccagagaaagtgcaactcctgtggcaattccttttatatattccttatttttcattgatatctccgcccccctgtaaaaataaacggcacaatgctctctttcttctgaaagacaaagccttatgccgcttgttcatttctctttattttcaaaactcatttccggatgctgtccggactttttatgtatactgaatattcctgaatgcgtttccttatacacgaagatgttttctcgttgtcaggaagcttccgatcagaccgattccgattcccagtgcaaggccaataggaagaagcgtcatataaatgtctgttaccggaataaacgcaaccacacctgtcagaacattgaattttgtcagtacatattcgactgccgtgttatataagaaatacagcgcaaccagaggaatcgccgctcccacgattccaagtaccataccttccattacaaacggcgcccggacaaatccatctgtagctccgatatatttcataattccgatttcttccttgcggacagagataccaacggaaaccgtattgctgatcaggaaaacagaaatcagcagaagcactgcgataatcgccatagaagcgtaagataccagacggttaaagcttcccagagtctttgccgcttcctctgactgatttacctcacgtacatgatccagtccctggataaaggcagacagctcattctgtttttcaatctgattcatataaacagcatagttggcagagtttacaagcgggttgtcgtcccggaatccctctgctgcctcagatccctggaaatactgatctttaaactcgttccaggcatcgtctgcagaagtaaatacaatttcctgcacttccggtcgctgcctgatctgctctccgatcgcatcaatctgttcctgagttgttccctcatcaaaaaataccgtgatcggcacttcctgctctactttatgagcaatgtgatccacattatttacaatagaataaaaaatacctacaagaaagatgcatgctgccattgtcagaattgacgcaatggaaaacatccagtttctttttatatttttaacaccctgcttcagggtaaaccatatggtactaggcctcatgatatcctccttctttctcatcgctgacaatgacgccctcatgcatggtaacaacacgttttttcatggagtttacaatttctttgttatgtgttaccaccagcacagttgttccgcgctcgttgatctctgccagaagattcatgatctcctcagcagtctgaggatcaaggtttccggtaggctcatctgcaaggagaatgtccggacggtttacaagagctctggcaagagccactctctgctgttctccgccggaaagctcatcaggataggatttgtactttcctgcaagtccaacctccataagcacctcaggaacacgtttacggatcacctttcccggtcttccgataacgcgctgggcaaaagcgacattttcatatacatttctgtctttcagcagacggaaatcctggaatacaacaccaagctttctgcggtacttggcaactctgctgtgtttcattgtttccagacgctcaccgctgacgatcaactgaccgcttgtgctgtcaagctctttcatcaaaagcttgatcagtgtggacttgccggagccactgcttcctactacaaacacgaactctcctttatccacatgtaagttcgcatggttgacagccggaaggccctttccgtatgacttacttacatcaatcagatctatcatatgttcctccttttagaacaaaccactgctttctcttcacagaaaaatactgccatgggattccggcagtatcagtttgcatcccgcaaataagcattttaatgtttttgtaacaatgttgtaacatacttccagctgaatttcaagtgtttttttgaaatccaaaagattttcataaaaattttacattcatagcagctatgaaaattttgaatatattgtgaatgatagaaacaccaggcgtttctccaggggattattgtacaggaaaggataaatgaattcaaggttttctttctattttatctctgttttcctcctgccatagattccattgtacagaatcccgtatctgcccatttatgattcctaattaaaaagagggagaattccgaagaatcctccccaactgttgacataaaaccaaatagcagctgttcacattctactattctgcagcgaaatgaacagtaacaccaaacacatctgcagcatcagtattccagtgtctccatatacttcatatatcttacaaccatcagcgcaattttaaatgtgatagcatcctcaaacactctcagatcaagtcctgtgcttttctgaagcttatcaagacggtataccagagtatttctgtgaatataaagctgtcttgatgtctctgacacgttcaggctgttctcaaagaatttgtcaattgtgacaagtgtctcttcatcaaaatcatccggagatttgttttcaaagatctctttgatgaacattttacacagcggtatcggaagctgatagatcagtctgccgattcccagggagctgtatgcgattacgtccctgtcgccgaaaaagatttttcccacgtcaagagccattcttgcctctttataagatctggaaacctctttcagctcactgacaatcgttccatatgcaatatgagtatcattttccagcccgaagcccagggtatcaagaatcgcatgagccagcttatccatatcgctgtaatcctctccgtcctcaagctgctttacaataatgatgcttctctcgtctactgctgtgataaaatcctttgtttttccgccgaaaaagctctttactgcttccattgcattgtggtctttttcctgctgaagctccatgatcataacaacacggcgcacatccgcatcaatgtgaagcttcttggcgcggttgtagatgtccaccagcaaaagattatcaagaagaagatttttgataaagctgtctttatcaaaccgctctttataagcaacgatcagattctgtacctgaaacgctgccagcttgccaaccatataagtgtcctcatcgtcaccatgggcaaccagaatatattccagctgataatcgtcacacaccttaaaatactgaaatccttttacaagctgactgtcagcctgagattctacaaatgcctgcacatcctgcgcctgaactgaaaaatccgaaaatgtagatgccagaacctttccttctgtgtctataatacaaaactcgattctggatatttcttttaacccttccagagtattctgaagtacctgatttgatatcatctgcaaacatcccttctcatgcattctgcatgtctcttctttttcccataaagaaacctgtacataaagatattttaatacaatatcaccaaaaataaaagaggaaatcgtaaatttgttacaaattttcaggtgatttttgtgtgtttttcctatctttctataaatccttctccatgaacctctcttgcatcgcctacgatcacgaatgctttaggatcgatttcgtcaattttttccttcagctgaaccagttccttcttgcccaccacacagtaaagcatcagcttttcctgcccggagtacattccttttgcagaaattcctgttactccacggtcaagatcgtgaatgatcattcttgcaatggcttccggcttatctgtaataatatgcactgcctttgaaaatttcagaccttcgatcaggccgtccgatacttttgtcacaagataaacggcaatgatagcgtaaagtcccttgcggattccgaacacgtacatacccaccaggacaatggagccgtcaataaactgcatgatctgggcaatggtataatgtctcatatatttctggataatggcggcaagcatgtccgttcctccggttgttcctccgcccagaaataccagtccgattcccacaccaaggatgatccctccataaacagaagaaagaagaaggtcatcagaaagcttccactccggaagaacagccaaccacatggtaagagtcatatctcccaccagcgctttttttacgaaggaaaatcctttcagttttgttgccagaataaaaagaggaatattcagactcagatttgtcacccacagtgggactccgttttctacaattcctctggtccactcctttaccagaatggctgctccggaaaatcctcctgtgaccagtccgcatgcatcaaagcatgccttgatcgcagttgccatcagtcctgtacccagaaaaataaccagatactcaagccatacagatctttttcctgccagtttcatataaaagcctcctcctgtagtgatataactctaacgcgataaagcgtcccttatcctaaaagaacgggagacggcccatgccgcttcccgctcttagtctgccctatttctgaggcatatttacaaatttaataaaatgatagctttcaacaatctggaaatacttgataattctgggatacagaggttcggctgcctccccgaattcatcttttaccagaagcgcaatgtctgtcactgtacgttttccgtcgaccaggggccagataaagcttccctgagcatccagatggaccttggtaaagcgcggtttgttaaacactgtctgcgcgatcttgttcatgatccctgtgttttccacttcaaggatcactctgtccttcagatctgtatgccacttcagcgactgatttttttccgggataagatccagatagttgatctgcatacctttatctttcttttttctcatcaggcttttcttttattccataaggagaatttcagaagaccaaggatcatcagcgccatgatcacaacgccgccgatatttcccaggttgataaatgcaggaatactgattccggcaaccgcaagaatagccaggaaaatacctacaagtccctctccggcaatcataccagcgcagtacagggtaccgttggtaacctgagattcttttgtcttgctgtcaacttttttacgtccgtccataaacatacgaacaacgccgccgatcataatggttgtgttcagataaatcggaaggtagagaccaattgcaaaaggcattaccggaattcttaagatttccaggcccagcgcaaggaatacacctacaaatacaagagtccatggaagatctccgcccatgataccctcaacgatcatcttcataagaccagcctgaggagcaggaacctctgcagtaccgtatccccatgcagcgtcaagaagataaagaacgccgccgattgcaagaccggaaacaacaacaccgaaaagctcgccgatctgctgtgtcttcggtgttgcgccaaggaggtatcctgttttaaggtcctgagaagtatcacctgcaatagcagcaacgatacagataacggatccgatagcgatcgcacccttcattccgtcgatacctgtctcacctgttgccttgatggcaaaggtagcaagaagcagtgtggcaattgccataccggataccgggttgttggaggaaccgatcataccaaccatacgggaggaaacggttgcaaagaagaaaccgaatactacgatcatcagcgcacccaggaagtttaccgggattgcaggaacaaaccagataataaataccatggcaacgattcctgcaagaataacgcccattggaagatctttgtctgttcttaaagtaccgccgttctgggatcctttcatactcttcatggaatcacggaaagtagaaatgatcagaggcagggacttaataagagaaatgataccgccggttgcgatagcgcctgcaccgatgtattttacatagtttgaccagattgctgaagcgccgccctctgcaaaaagctgggaaattgtcacgccagcctctgccggatacagagaaatatcaggtccgaacagacagatcagcggaatgatcaccagccatcctacgatggaacctacaaacatgaaggaagcaattctcggaccaacgatatagccaacaccaagaagagccggatatacttccataccgatctcacccttaaaggatttaaaagcaactgcaacgtctgccgggattaccttcagaccgtctacaataaatttgaatgcagcggcaattcccataccggagaatacagtagctgcattggagccaccctcttcacctgcaagaagtacgtttgcacaagcagttccttccggataaagaagagttgcatgctcttttacgatcagagcattacgaaggggtaccatgaaaagtacgccaagtacaccgccgcaaagcgcgatcagtgtaatttctacaagtcccggtttttcagtaaggccttcttctgcccacaggaacagggcaggcattgtgaagattgctcctgctgcaagagactcacctgcagaaccgatggtctgaaccaggttgctctccagaatggagtttttcttcataatcacgcgtataacacccatggaaataactgctgccggaatagaagcagatacggtcataccaacgcgaagaccaagataagcattggctgcgccgaatacaactgcgaggatcatacccatgattacggatgtcaccgtcatttccggtgtgattttttcagccggaacatacggtttgaactctttgttgttcattgatttcctctccctttattttttattgcgaaccttttttcattatactaatttacgacagcatatgcaagttgtttttatacgataaatattcaagtttattctataaatatacaggtttacctcatttcacacctgcatctgtaaacaataaaagctcctcttctgctacatttatttacgggatacagaatcttcctgtttgtccggacggatgcatatacaacaaaagcgctgccctgcagataaattccttacctgctttgcagcgcttttatgtttgcttatttcagagaaaagtctttctcagatatgcttatcttccgaactgcatatcgttgtttccggactctgtctcccacatttcaagcatgttgatcgggtcattgtagtctgccagccagccttcacgacagaagtcgaatttaccctgttttctttcatcaaggaatacagaccactcacgagtctcaactgttacgttgatgcccagagctgcaaaatcctgctgaatggactcgccgattttaacattgccctctgcgtcgtttgtcagatatgtcatattgatcggagtatcagcggaaagcattccgttctcatcgaatttatagcctgcaccttcaagaagctttcttgcttcttccaggttctcctcgtatgcatttggatcaaagtatccaacaacgtcttccatcggatatgtgtaagcatcgtcatttacacggaattctccgccgttgccgtctgccatacctgtaggaataaaggtatttgcaacttcctgatcagcctgggcgattgtgtcaacaatatactgacggtcaatgataaggttcatagcctttctcatgtcagcagcctgctgtacagttttgcctttgaacagatcgctgtttacgttaaatcctgcatagtaggttccaaggttcggaatgttgtggtattcttctttttcttttgctgttgccatcatgtctgttgcgattgtgtcgataaactgcagggaaccatcttcaaatgcgttccagattgctgtatcatctgagcttagcatgaactgaactttttcaagagaaacctcgtctgctctgaagtagttcgggtttttctcataagtcatggactcattgtgtttccactctgtacatgtcatcgggccggaagtaacgaatccagcctcaacacaccatgcgccaggattttcgtcagcgccttctgctgcttctacactctgctgcggaaccggatagaatgccgggaatgcacacagatcaaggaagtatgcacatggagctttcagctttacagtaaaggtattgcctgttccggcgatatcaagtgtatcatcatcttttcttgcaatgatatctgccaggtatgcatagtctgcaccagtatcaggatttgcaagacggttccagctgtatacaacgtcctctgcattcagctcctctccgtcagaccatttcagaccctcttttaaggtaaaggtgtaagtaagaccgtcctcgctcatctcatagctgtctgcaagctcaggaaccagttctccgtctgcgttgtagctgtacagacctgaaaatgccaggattgcaaggcaggcaccgtctactgtagagttcagagccgggtcaagtttgttcggctcagatgcgatctgaaggcttaaagtgttgtccggagtttttgcaaatccgaaatacttgaagccgaacaggttagagtaaatgttctctacatctgttttctgcatgtacacatcattgtagtagtacagcggaatgattgcccatgtgttcataagctcatcctctgcctcatgcatcagagcttcacgtttaaccaggtctgtctctgttctgatttctgcgatacgtgcgtcatagttctcccatgccggtgccgcttcgctggatggtccgtgctcttcagaagcatatacagttgcccccccctacggtggtcactgccatagctgctgcaagagcaagtgctacgtgtttcttcttcataaaaatttcctcctgtctggattttttatttacagctttcactgcagtttatacaaacaccacacaaatcctgcacggtaattgtattcctataaattgtatgtcccgatatctgcttttatttgttaaagcaggccaccatatgtccgtttcctctgtctgtcagtgtcgggcattcctttgcacagcgctctgttgcatatttgcagcgggtacggaacgcgcatccggtaggcatgttcagaggacttggcacatcaccctcaagaatgatacgctgacgctccttggccatcttcggatccggataaggcactgcacttaacagggactgagtatatgggtggataggagattcattgagatcatctgcatctgcaatctccacgattcttcccaggtacataactgcgatacggtcagaaatatgatgaacaaccagaaggtcgtgggcaataaaaagataagcaacacccagcttctcccgaagctcttcaaacatatttatcacctgcgcctggatggaaacatcaagggcgctgaccgcctcatcacatacgataaatctcggttttgttgcaagggctctggcaataccgatacgctggcgctgtccgccgctgaactcatgagcgtagcgggttgcatgctctgcattcagtccaaccagctccatcagctccaggatacggtcgcggcgctcgcctttgccggagtacagcttatgtacgtccagaggctctccgataatatcctctacagtcatacggggattcagagaagaataaggatcctggaataccatctgcatctctttacgcatatggccaatgctgtttttgtctactctttctccgtcaaaaaacacatcgccggaggtaggtgtatataatctcagaagagaacgtcctaccgttgtttttccacatccggactctcctaccagtcccagtgtttcacctggtttaatgttaaaggatacgccgtctactgctttcagaggtgtatttttcataaaacctgttttaacaggaaaatactgtttcaggttgttgacctcaaccagatattctcttttatttgtcacattactcattgttctttccctcctgctgtgcctccatctgctccttcacactcatccagcaggaagcaaaatgtccgtcaggcatctggatttccggcggaacctcctcgatacagattttcattgcattctcacatcttgggcagaatgcacagcccttcggcatattcagaaggttgatgggggttcccggaatcgggatcagcttctctcccatacgatccacgcttggaatagacttcagaagtccttttgtatattcatgggccggacggtagaagatatcctcagcggttcccctttcgcagacacggccgccgtacataacaatgatctcatcacacatatctgcaatgacgccaaggtcatgagttaccatgatgatggccatacccagttttttctgaagactctgcatcagctccaggatctgcgcctgaatggttacgtcaagcgctgttgtaggctcatcagcgatcaggatatccggctcgcatgccagagccatggcgatcataacacgctggcgcataccgccggacagctcataaggatactgttttacacgcttctccggctcgttgactccaaccagagtcagcatctcgatagcgcggtccattgccaccttgcctttacggtctgtatgaagctcaatcgcttcttttaactggtttccgatagtaaatacagggttcaggctggtcataggatcctggaaaatgatagaacagcattttccgcggaattctctcatctgtttttctgaaaactttgtaatgtcctgtcctttgtaaagaacctggccctttttaatgcttccgttcttttccagaatctgcataatggaatatgcggtaacactttttccggaaccggactctcctacgattcccaggatcttgcctctgtccagattaaaggaaacaccgtttaccgccataacctctcctctgtcagtgcgaaaagaggtatttaagtctacgactgaaagtatattctcactcatcttaatccctcctcagtttcgggtcaaaggcatcgcgaaggccgtcgcccagtaagttaaatgcaagtgtgataagacagatcataatagcagggaagatcagcttataaggataagcagtcagacccgcacgtcctgcatttgccagagatccaagagaaggcatcggagcctgtacgccaagtccgataaagctcaggaaactctctgtaaaaattgctgacggaatctgaagagcgcctgctacaataattacgctgacacagttgggaagaatatgtctgcggatgatccttcctgattttgcgccgctgatcttggctgccagtacgtattcgttctgtttaatggtaaggatctgtccacggaccatacgtgccatacctgtccagtacagaagtccgaaaacaatgaacatggagatcatattcggtcccagcttctgaaggaaaggaatcgcatctacgttcagcgtttccctcagcaccacagaaagcaggatcaccataagcatatccggaagcgaatatatgatatctacaattcgcatcatgatcaggtccaccttgcctccgaagtatcctgaaatacttccgtacagaacgccgatgatcaggacaatgatgctggcaaaaagtccgactgccagagatactcttgttccgtaaataacacggacaaagtagtcacgtcccatttcatctgttcccataatatgagggaataccttaccgccctcctctatgtactgctgctccagttgtgagtactggaagggagccatattggaggctgtcttgtctcttctgccatttacagtaatgatctgagaataggaatagggcactacatgaggtacgatcaggatcattccaatgatcaggatcagaacgatcagactgcccatagccagcggatttcttctcagcttgcggaatccgtccttccagaaagaagtggactcgctcataacatcctgctgtcttttctcttcatcagttgctttttcaaattttttcaaatcaatctggaagctcaatggcgacttcttcggcatctcatccagatttttactggtgttatccacgtagtttcctccttaatccagtttaattctcgggtcgatcatcttatatacaatatcagtgatcaggttcattgttaccatcagtactgccaggaaaatcgtagttcccatgatcagaggataatctctgttcgtaatggcctctacaaattttgcgcccagaccgccgatagtaaagattttttccacaacaaggcttcctgtaagaatagatgccgtcatggggcctacataggtgataaccggaatcagagaattcctgagcgtatgtttaaaaatagttttcagctgggacacaccctttgctctggctgtacggacatagtcctgtcccagaacatccagcatactgctcttggtcaaacgtgtgatatacgccatggggtaagctgccagggcaattaccggaagaagataattctgattgtccggactccacacaggaacccatttcagagtcacacagaataccagaagcagcaacgatccgaacacgaagcttggcagcgacgtaaacagggtggaaaagaaaatgatcagccggtcaggaagatgatttcttgtaagcgctgcaagacttccgaagatcagacccagcacaagggcagtaaggattgccattccgccaagctttgctgaaactttaaaggattcaaaaattgttgtcttgatgtctcggcctgtttttgcggaaacaccgaaatctccatgagccaggttcttcatatagagaacaaactgctcgcctaccggtttgtccagattaaatctcttctccagtgcttcttttacttccggagaaagtgctttttcaccgtcaaaaggtccgcccggaatggcgttcatggcaaagaatgtgataccacagacaataaaaacggtgacaatagcgagaagaactcgctttgtaacgtattttcccacgtaaatacactcctttttgttttttctgacaatattgaagggatgcgctttcatttgtataattcaggatttccttataaaaaagttcctctgttttcattttttatcactttagtgtaaacatctgtcctctgttagcggacattcatggtaaaaaaaatagaactctttcaggttcctctctatccctttattgcatttacacattatatctgattttacaggattattcaactgtttttttgatgttagaataaaaaatacgcaaaaaaattacagttttttcctccattctatatatttcccacaaaaaacaacagcctgatacctgttattatgcaggatatcagactgttactctgtttcaagctgcttcttcagataccttccgacgattctggagaagttgcggatgtcccggatataggcaaaatccttgccaaagatcttcttttccgtagaaagatccttttcttccccggcaaacactcccagcacactgacgtcaagattcctcagtctgcggacttctgtggctgtatctgaaatcgcggtgtttccccggtagggctgaggatttttagcattgggcctgttgacgatcacatcatagggccgcccgtcgctgagtacaataaggatcttcttttcttcctgcctctgaagaagactatggcccgctgtttttatggcaaggccgtccctgttattggaagaggtcacgtaattaaaaatattctcgttttctgttctgggatcatcatacttacggaatctgtgcaggatcgtataatcccagaaggtacagaagctcataactctgtgaggaatttccacattgctcagagcctcgctgataatataagcctggatcgccacctcgccctgacggctcatctgggaaccgctggcatcgatcagcacgtccaccacaaaatctgctgcgtctgccttcagctctctctgaaagattttggcatcactgcttctcccgatcctccacagtcttgagggaacaatcattcctctgtcggagagcacagtctgggtttccgctctcagggtaagagatttacgaagggtgtctgtcagctctgcgatattgtgttttacaattctgtgtttatcatgatacagccagatatttttgtttctcagacggactgcatattcatactgataatttctttttaccggatttttcaggattccctctgtaaaataaaggctgcagtctccgtggatgccccggcacataagatgattgatccttttttcttctgtttccgtcagataggtttttccgtaattcagctccacgtatgtatgggccttttccagtacctccggtggaagaaccgtgatcttgtgcttttttctgcgttcctcttccatggattctgtcacagctctgtcttcaagccccgtcatatttccggtaagctgctccatatagctttccagagcttcctcatacagctcttccgtgagataatcctcccagggatattctgtaagctcctttatgctgaccgcaagtaccttttccagattcccgtgaacagcttcaaaggacgggtccaccatccggttatagagcttatccacaagccggatcaggtccatggtgttctctgcaccggctgcgcctgccactgtgtccgtgagctcctgaagctttttttccgcccggtaggagctgccctccagccgtcttcttaaaactgctgctctcagctttccaagcacatttcccggagcacacatctgttcaaattcctgatccagaatatcctcgcaggcctttcgctgaatggagcggatcccgggacgttcccggcagactttttctcctacggcttcttcaatacaaagctgggcaagctgcgtcagacactgttcatccgcctgaagaaatactttttttaccaggtacattcccatcatgtccctgtcgtaaaatctggcaaaagccccctgtttgatgccgtcataaagggcaattgcctctgatcttaaaaacagggccacatccggtttcatttccagtccgtaatctccgctgacagtccagagaagatttttcagcctgttttccagttcaaaccggctgtcatccagttccgtgggaagttccttattcatagacatcctcttttgtccattcacgtggaatgcgggttctcactacatcctccacgatctctttttcaaaaacatcaaaggttttattgatcacacccatctgcacagcctgccagggggaaagtcccgtgtccacgatcttcatggctgccagaagtcctctgagatccagaggctttgtggaaatctcactgttcagagcttttttctgaagatccagaaatactcctgtaaactgttctactgcttcttctctggcaccggggaacatctgatgaaagataaatttcagagattcttcagtctgcgccggcatgtcgatcaccagaaaacgggaaacaagggcttcgttcagttcctttgttcctgcatatccgtaattcatggttccgataaatctggccgcagggtggagatcgattctgtcataccccggaacatcaatggagcgacggtaatcaagggtggcatgaagtacagataccgcgtcatttttcgccatattgatctcatccagaatcccgaagccgccatattccgcgcactgataaatactgcctttgcggagctttacctcattgtcagaaaacgtatcggttccgatcaggtcgccgctgttggtatttacgtgaaatgatacattataagaaggtctgccgaaaatataggcaagattctctgccagaatatttttgcccgtagccttcggtcctgtcagaagcagattttctccccggagaaggcctgcaatagccatctccaggatatcttttccataaaaggggatcgagggcttcacaattctgtgaacagcagcctcatctgtggtatatgtatttcgaaattcctctgcctgacagatcagctccggagaaacctgctgctcctccagaaatttcagttcttccatattacacctcaaaaatcagatcgccgtaggaaggcattggccacatttccttatccaccagcatttccagctcatctaccggtctgcgaagctcttccatggctgtcactactttttctctgcagtatacagcgcgctctctgccttccggatactctccgatgtgagataccacctcggccagagcctccatggcttcgtttgtctttgcaagacgctcagagcatttggtaagaagtccaagctgtacgctgacatccactgccgctgctgcgcggactgcgtttacagactgggcaagtaccgttgtatatttgatcactgccggaatgatctgcttggtaacaatatccagcattgtctttgcctcaatgttaatggcttttgcataaatctcatactggatctccgcacgggattccagctctgccttagtaaatacatggaaagtttcaaaaagctctacagctttgtctgtagtaagagccggaatggcatcaaccatggacggaagaatcggaagtccccggcgttttgcctcttcctcccattccggagcgtagccgtttccgttaaatacgatcctctgatgctctgttgcatattccttgatcagatcatggacagccagatcaaaatcaggagccgcctccagacggtcacaggcctctttaaatgcctgagctgcaatggtatttaaaaccacattacattcagaaatagaatctctggaaccaaccatacggaactcaaatttatttcctgtaaaggcaaacggtgaagttctgtttctgtctgtggcgtctttcataaaatcaggaagcgtttttacacctgtgtgaagcttactgccttttttgctgtgagttgccattcctgtgctgatcagctgatccagcacatcctccagctgctctcccagaaatacggaaataacagcaggcggcgcttcgtttcctcccagacggtgatcatttcccacatctgccgcagattcacgaagaaggtctgcatgaatatccactgctttcagaatacaggtaagaacaagaaggaactggatattctcatgaggagttttgcccggctccagaaggttgatcccgtcatctgtggtcagagaccagttgttatgcttaccggaaccatttacgcctgcaaagggcttctcatgaagcaggcagcgcataccatgacggcttgccacctttttcagaatgcgcatcatcatctgattgtggtcggctgcaatgttggccggtgcgtagattggagcaagctcatgctgagccggagcaacttcgttgtgctgggtttttgcagtgattcccagcttccagcactcttcattgacttccttcatatatgcggaaactctctgacggatagttcccagataatgatcgtccatctcctgtccctttggcggcattgcgccaaacagagttctgcctgtgtaagtcaggtcttttctctgaagccacttttctttatctataaggaaatattcctgctctgctcctacagacggagtgacttttttggatgtggtatttccaaaaagacggatcagtcttaaagcctgtttatttactgcctccatggaacggagaagaggagttttctgatccagagcctctcctgtataagaacagaaagcagttggtatacacagtgtgccgcctgctgcgtcatggcgcacaaacgcaggtgaggtacaatcccaggctgtataacctcttgcctcaaacgtagctctcagaccgccggaaggaaaagaagacgcatccggctctcctttaataagctctttgccggaaaagcttaaaagaacctttccgttttccatgggagcagtgataaaagcatcatgcttttctgcagttactcctgtcagcggctgaaaccagtggctgtaatgggttgcccccttttcaattgcccattccttcatctcatgagcaactacatccgcaatctccatagacagttctttgccttcttctatggtttttttcagctctttatagacttttttcggaagtctctcctgcataacggaatcattgaacacatcgcatccaaagagttcttttacgttagtatagtctgacattagctttctcctttatgttttctgttttattggcttaattcttttttgtgctttttaaatacagattcagtgctttatgcatattttctatttctacggacgtgtgatttcctccgaattcaccgtccagcgtccacggaactgcttcctctgcctctatggtgatctttcctgttttaaatgaatgaacaagatccgtattatcctcagccataacaagagctgtcatgatctcctgaagctccagagggttcttgggctttacgatcagtgtcacttcaaaaaggccgtcattcatatccacattcttgcctgtaagatttttaaagcctcccacagatctggaatttgtgatcattcctaccataaaatcatcttctacttcaatttcctctgattttactttcatatgataggatttgatatcaaaaagtcttttgactccttccagaatataagccacatgacccagaacatttttcagatcctgatccgtctcataggatacgtctgtaaaaagtccgaaggctgccacataggcaaaggtctggctgttaaaccttccgatatcgcagtgatacagttcttcctccatgatcatggaagcagcctctgtcatattcttcggcataaacaggctgttggcaaaatcattggtacttccggcagggatatacccgatggggacatcactttttttctccataatcccggtcacaacctcatccagcgttccgtctcctccgctgcatacgatcaggtccacctcatcagcgtactccctggcctgctcgtaggcgtcctttgccttctgagtagaacggatgatcacctcataatcattcttattaaaaatatcaataatatccagcagatgggttttgatctttcccttgcctgccttggggttaaaaacaaagagcattttctttcccacagtcccattcccctttcgattattgtacttgcctgtaaaatcaggcatattcgtttattatgatacaacaaaatggaaaaaatgcctagaggaaattttatgcggacgccctgtgacggcttccccgccatcgtcggaagccatacctgtccttttgttttcagcctttctgatggccggaaaaataatccctcagaacacagatgctttcttcccgcataacgccggctgtcacttccggtctccagtgagatctttcaaataccagttccgcacagtcgttcccctgctcgcccaggatttcgcagagatctctgtcgctcgccccatataccagtcttccaagctttacccataccatggctccgcagcacataaaacaaggctcgcagcttgagtacagagtataatcgcttaaatccgtaatccctgtttctttacaaaaacgccggatcagtcctgcctccgcatgaaaagtaggatctgtggctgtatagatctgattttcattggtgtatacagcttctccgtcctttacaagaactgcgccaaaaggttcgttgccgtgttccactgcaagcgctgcaagctcaatggcctttttcataaatacttcatctgttgtcataatgtctccccttctctgttctcattctaaccatcagtattttaccatagcaggaaaaaagttactataaaaaaacttttttagtatctctaaaagcctttgtatatcacataaatttccgaaaaaaataaaaataaatttttttaaaaaaagtgttgacatttggatatatgtgttatatactaacgaagtcggttgagggaaacgaaaaaaacttccactgaacagacatcagatatggggtcttagctcagctgggagagcatctgccttacaagcagagggtcataggttcgagccctataggccccataacaaccgaataaacagacatggcgagatagctcagttggctagagcatacggttcatacccgtagtgtcgagggttcgaatccccctctcgctactgaaaatccggaacataaagttccggattttttgttattatgctaaccctggttctgttcttccattttttcgctttcaccactatccaatcccaatatttttatgctaatcatattcttttttagttttttctatctattttttgtgcattttgcacaagtatccctctgttttttctacaaaaccgattcttttctgtctacataaaatatgctaaaataaatatagattttacttcaggtacacacagaaaaggaaacaccaatgatattacataaatatctgcggaacatacagagttctctgtttcccgtattccgcatttcttgagacatttctttttcctattgccaaagataaagtaaaatctaaaaaaggacattacaaagcacatttcttctgaagtgtattttgtaatgtcccgtttttatttatacagttctacaaacgcacagtctcccgctttctgtttatttcccggaaggctcttggtgtcacatgatacttttcccggaatacccggtgaaaataactgccgttctcatatcccactgccgcaatgatatcactgatcggaagctctgtctcacacatcagttctatcgccttattcatgcgcttccgctgaagcagctccttaaaattaaatcctgtgttttttttaatcattttgctgagtacatgcatgggaagatgaagcctgacgcacagctccgtcagggtagctgtcttataattctgctcaatataatccagagttgtcatggatatcatattttcatattgattaggcactctcatctctgcatactggacagaatccagaagatacagaaaaatcagtcccatggtcgtctgattgatccggttctgatcccctctgcctgttaccagagaatagatcatattttccagaagattctggatctgcagcacctctgccacacgaaagtgaagatactctcccttttcttcattctgccgtaatacattaacaagaaaatccgccagtacattattgcttcctgccatggtataggccacatcaaaaaactccggaagaatcataaaattaatggcaatatcattttttcccgcaggcaggatctcatgtctggtaaactggttcagaaacagaagctctcctgcctcaataaccacctgctttcctcctatgatattggtaagcgagccttcgcacacataaagcacctcgataaaattatgcctgtgagacggaaaatgcacaaatctggtgtgggtccgcactgcgatcagctttccctcctccagcatttttgcactgtccacagtaaagtcctttcctgatgtatacagcccctgatccacttctgacgctccatcaagaatacgctgctcttcctctgttatttttcttaaatggtccaaaagtgcctgctgcatgtttctaccgccttcttactgattttttcttatcatagcacaaataagaaagagacgccagcttcccggcgtccctcttcaaaaaggattcttaaatggtatgaaaaaacttcttatttttattgctttattttagtacagctctgcgtactcttcaatgttctcaggtgtgaactgaagcggctctccaagaacaatctctgttcctttgtcatcagcctctgtaattgtataatcgccaagatcgcctgctgtaaatgtctcgtcaagcgcgcctgtgatatcgccctttacaagtgccatggttgtgtaagcgctgagctttccaaggccctgcatatcccacagatagaagtacgggcaggaatgagcgtcgtcatcgcctgtgtactcaagcatttcagaaggaaggccaagacctgtcagtttacatgtggattcattatcctgaagatattttgcagctgctgcaataccgacagttgtaggtgcgcagataaccttcagatccgggtagttctgaagaagcgccgctgtctggtctgtagatttctgaggctcatcatcaccataagcaacttctacaagctccagtttgctgtatttctcatcttcttccataattttcttcatagcgtcgatccatgcgttctggtttgcagcctgggatgtggcagaaagaattgcaaactggccttctccgccggaaatatcaaggactgcatccataagagcctgtcctacagccacagtacctgcctgatttacaaatacctgacggctgtctttattgggggcagagtcaaaagaggataccttgatccctgcatccatagcttctgtcagttttgcctgaagagcatttacatcgtttgctgcaatgcagattgcatcaaaatcctgggaaatcaggttgtcaagaactttgatctgagcatcagcagttgctgtctccggatatacaacctccactgttccgccttctgcttccactgtttccttaaaggaagctgctgcgatctcaaagaacgcgttgcctgctgatttgcccacaagtgcgatcttctgtccgtctcctgcgccctcagccataaccggggtagctgctccgagaaccattgctccacaaagaagtgcgctgataacttttttgttcattttgttttcctcccttggaataatatagtttttagttactgagatcagtaacttttctgctgcataagctgcagcattttatctggaactgctctcctctcagaaaaagcagcacctttcattttaaaaaatatcacatgattttacaattatttatttactttttacagttcttcttacctgtccgataatattcggaagagcaactgccgcgatcagaagcgctccgataataagaaggatcacctgcgcatggacgttctgctgtcccagtcctacgcggagacatacgataataaatgccgcaatcacgccccctgcaatatttcctttgccgcctgtggaagagattcctccaaacactgccatggcgatggcgtccatctcaaaaccgtttcctgttgtggtattggctccgaaggatgaggacagaagaaaaatagcgcaaaggccggaaaccgttcccatcactgtataaatgatcatgcggatcttctgcacatgaatgccggaataatatgcggtcagacggtttgttccgatggcatatactcttcttccaaacgtgctttttccaagaacaagggcaaagatcacagccaggatcacaaccagaaacagaatatagggaacctgtcccacctttcctgcaatggcagtgaagccgtccagatttgacatggtaatacttccgccgcttcccagaatgatctccgcaataccgcggaaaataatctgagttgccagagtgacgatcatcggaggcagctctgtaaattttgtaaggatcagtccgttaatggcaccgcatacagttcccacagcaagaccggtaaggacaactacgataaacggagcgttcatgttgcacacaatacagcacatggtggctgacaaacacacaatagaaccaacagaaatatcaatctcgccaaggaccaggatatatgccatggggagcatgagaaatacctctgcaagataaaccggcatctgacggagcagactgctgatattgtaaaactcagaaaacattgcgcagaaaatattcactgcaataaagatcagaaccaggattccttcccaggagaagatcatccgctttaccgaactttctggtacattatttatacttcttccggattttccagccatgattacatctcccttcctttcagtgcatttttgtctgccacacgctgcagcactacgttcattacaactacgatcagaatgatcagtcctttgatggtattcagccagagctggtcaaagaacggaatcagaggaagcgcctttgcgatagtcgcaaggatcagagagccgaacaaagcgcccagaacacttccgcggccgccgctcatgctgacaccgccgattacgcaggccgcaataacgtccatttcgccgccatactgcatgtcaggcattgctgatgcataaacggaaacctgaagagcgccgccaagacctgccagaagtcccatgatcacataaacaagaagcttgatgttctttacattgataccggaaacctctgccgcgctggcattgcttcctaccgcataaatcattcttcctgttctggtccatttcataaaccagaaaaagaatgcatagcacaggatcacaacccagatcacacagttgataccaaggaattttgttgttgcaaaatccttaaagctgcccagagccgctgcgccggcccactcaccgccgttggaaaccaggtagcccattgcccggaacacatacataaatcccattgtggcaatgatcggcggcacatctgctctggagatcacaagaccaaccaccaggccgcagatcataccgattcctatggcaattacaaatgccagaggagcagcttcaatgacatcgtttttcagcagcataccaatggacataccggataacgccagagtagacataatagaaatatcaattccgcctaccagcataacacacagcatacccagagccatcaccattgttaccgcattgtttttcagcatatccatcagggatttcggagtcaggaaagacggattaatggctgttatgacaataaaaaggacgatcagaacaactgcaagcagagcttcacgagatcctgtaagtttttttaccaatgatttcttttccattattttgaagcccccttttccatggcaagctcaaggatcctctcctgagtcgcttcctctcttccaagctcgccggtctttcttccgttgcacattacaataatacggtccgccataccgaggatctcaggcatttccgaagagatcagaattatggcatagcctttctttgccagatctcccataatcccgtagatttctgccttggctccgacgtcaacgcctttagtgggctcgtccatgatcacaagcttcatctcctggcttaaagccttggcaacaactaccttctgctggtttcctccggacagcgagcttgcaggctggaaaatatcaaccgccttggtatctacctcttccagaagcttctttgccagatctctctctgttttttcatcattgattccggcctttgaatatttgctgatagtgggaagggttacatttcttcccagcccccagctcatgataaggccttccttctgacggtcttcaggaagaaggataatgcctttttccattgcatctgagggctgcttgatatgaacttccttcccttccagataaacctttccggaatccggacgggtaattccgcacacagcttccaccacctcggtacggcctgcgcctaccagcccggtaagaccaaggatttctccggctcttatctcaaaggaaacatccttaaaatatccggttctggaaagcttttctaccttcaggatctcctctcccggctgaacctctggcttcgggaaaagatctgtgatctcacgtcccaccattgccttgatcagatccgcattggtaataccgtttacatcataggttccgatatactgggaatcacggaataccgtaactctggaagccagacggtacatatcctcaaaacgatgagaaataaaaataatggaaactccctctgactttaatttgtccacaagtgtataaagcttttccgattcagatcttgtcagtgcggcagtaggctcgtccagaataatgatttttgcattggtagacattgcttttgcaatttccaccatctgctgctgtgccacacttaaagttcccatttccgctgtggcgtcaaagtctgcatccagctgcgcaagaagtttatttgcttctgtattcattgccttccactggatcattctgtttttaatgatctcatgacccataaaaatattttctgcaactgtcagatgcgggtaagatgttggatgctgatatacggctgcgattcccgctgcctgagcgtccttcggtcctctgaactccacttttttaccgttcaggaacatttcaccttcttctgctttatgtacaccggtaattaccttaataaacgtactttttccggcaccgttttcacccatgagcgcatgaacctcgccgggtttcagctgaaactgtacattattcaacgctttcacacccggaaaaatctttgtaattccttttagctcaagaacatattcagacacggctcttcccctccttttttctatctgttcactgattttattttaccattggtgatttttttataaaatgggaatatatttggaatccgggtaatatcttttcatttacatgcacaaaactctctactttttctctcgtattcctgttaaaaatatgatagactatacctgacttttacttataacaaggagaatcctatgaaattactgatcgtagacgatgaagagcttacccgtacagggctgatcagcgccattgactggaaatcccttggcattgatcagatcattcaggctgacgacggtattcacggtctggaacaggcccgtctttacaaacccgaaatcattttgtgtgatgtacgtatgcctcgcatgaacggaatcaccatgctggaacggctggaaaagcttcttccggattctgttcctgtttttatgagcggctattcggataaagaatatctcaaagctgccattcgcctgaaagctgtcagctatatcgaaaagcccctgaatccttccgaagtctcccaggcagtccgggaagccgctgatctttacatacagaaacgccactcacgaagaggagaggtcctcaaatccatggaaaccgcctcccgtctggcgctgcttctgacacttccagctttacctgatattcagactgcccgcagacttttcggagaacttggttttactgtaaacagctccactttttttatttcctttattataagaatgaatacctttccggagctgtctgctctggagatgttttatcaggagctgtctgactttctggaaaaaagaaagatcaattttatttacacagacaaaaagcatcagaatctcctgtgtttcctgtttggacagacagaaccttccatccggtgctttcatgaaatcagcgactttatctgtcagcgcctttctgttctgggaagattttccattgcagcaggagaaactgtatacggaatggcaaaagcctatcagtcctatgcctccgctgtgattcttttgcagagcagtttcttttttccggaaaatacactgctgacccctgacagactgaaccagagcacaaagtcctcccctgagctcgtttctgcatcaccggaaagcgagtttgcagactcactctcttccgggcttcctgaatctgcctttgttcttctggatcagcttcaggaatattttactgaaaatacaaaagtgttccagaatgctgtaaaggatctctattataaactgttcctgacccttgataaggcccggaaacagaaccttcagacagacgatgtgtacgcagaacccattgcagagatcattgacagatgttttactttttccgagctccatcagacgcttcgccggcagactgaagactttttggaacatgcgggaaatcagacacatgagaatccaaccatccatatgatcaaaagctacattggaaaacattacatggatgagacactttctgtcatagatatcagtgaacacgtttttctttctgcctcctatgtatgtacctttttcaaaaacgaaaccgggcataccttaaatcaatatcttacagagtacaggatggaaaaggccaaacagctgttaaaggattccagataccggatttcagacatttcatccagagttggctacagcgacggcaattactttggaaaaagctttcgtaaatacagcgggctttctccgtctgagtacagggagaaaaatctgaaatgacaagattattaaaaaaaatacgtcagatttacggagatatgaatctgcaatcaaaatttaccattgtactgagtattgccgtcacgattccggtacttattgtgggaatctttttctacacccggctgtatgacatggttgtctctgataccatccgaaaagaacaggatgcatcctccgaggccgcgcctctgatagaggcccgtatccagaaaatcctggatgcctatgaggagatcacagagcttggattctatgaaacattgtttcaccagccagtcaattcccctttccagatgcttctggatccccgggatgcagaagcatttcagaaaaaagcccaggagcttattgacggtcagaccattaccggacttcagatctacatggattttccaacagaatccgttaagctttttcgcgatgagctgaccagtgactactttgtgccaatgagcctggctcagggcacctactggtacggaatctttcagggaacaggaaaatccgagctctactatccggaattttatctgggagaacgggaaaaatgtaccttcggagatatggcgtacattgtttccactactttttattatcagggaaatgcccatcaggcttacattgccctttattcctcctcagatcagctgacgcaaatgctgaaaaggaatctgactctggacggcagcgtttcttacattatcaatgaaagaaatgccattgtggcatcttctgataaatccgggacgggtatctatcttctggattaccagactgttgaagattcctttatggcttccaacggtttcattgaaaggacgatcctcgaccagaagatttatgcaggattttacaatatccgacagcccggctggttcatggtaactgtcctgccctcttcttctcttttaaaacaaagcaattttatcatgttccagtatatccttatgtaccttgcagtgctggtgcttgcctcagttatggctcattttctggcccggtctgtaagcagccggatctcctctgtgatccggcagatgagcaaggtccgtcagggatctccggttcccatggaaagccctgtttatcatgacgagattggtgatctggtagatacctataactatatgactcgaaaaatacagcagcttatggacgagcagatgaaagcggcagaagaacttcggatcgcagaatttaattctctgcaggctcagatcaatccgcattttctgtataatactatggatatgatcaactggatggcgctgcagggacaaacctcagagatttccagcgctgtacaaagcctttcccggttttataagctgacactgagccgcaaaaaaagcatcagcaccataggagaagaggaagagcatgtttctatttacctgaaaatccagaacatgcgctatcatgacaatatttcctttatctctgatattccggatgagctgacagattatcagataccaaagcttaccttacagcctgtgatagaaaactgcgttcttcacggcattctggaaaaggataccaaggccggaacaatcgttctcaccggctggatggagcaggaagatattgtgcttctgatctcagacgatggcgttggaatccctccggaaaagctttccacaatcatttccggaaacagcgcaggttcttcctccggcggcacaaacattgctgtatacaacacacatcagagacttcagatcctgtacggcagggcttatggacttacctataccagcaggcaggggcagggtacagaggtgcagatccgcatcccggcccgcaggcagacacaggaaccggtgtgacatgataattatctgagataatatcttatggagaaaaacctcttctattctgtagtatagaaacctgtaaactcagcagacatttttgactgcgccattattctaccaggaggcatttttttgaacacatttgattttcacaacatgaacttatccacactgggcagggctcccgcccccaaaccacagattcttctttatcatttttcgcaggatgaacgcaccagacagatcagacgatatctgagaagagctgacgttgacgtccgtgaagtgcctgcttctgatttgtttcatcctctgggatacctttttgaaattccgggattttctccctgttccaggtttcccatgggagaaaacttcagcgaagaaatgctggttatgaaagatttctccaacagtcagatggacgcttttcttcagtttttccgggacaatcagctgaaaaacgttaatctgaaagcagtcctcactcctgttaccgtacactggaattccatggagctttaccgtgaactgaaaaaagaacaccaggagctgagatagctgtctcagctcctggtaaaatcacatgtgcagcaaaagtttttatgtaatggattcccatgctgacaaaaacaacatcccgcagaaccatgaccggtctgcgggatgttgtttttgaatatgtgtaaatatcagatactctctcaaaacgaaaaatcgattttatcttgtaacgatctcaaccggaacgttaaagatttttgcaaccttgagaatcgtgtcaatgtgtcttccggttgctgctgccatatgatgtgtgggaccggcttcactccagcggtttacaaactctcttgcaccgcaggtaaagcgtgttctcatattggtatctccaaaggaaaggatcggaccttcctcgttcacgccttctgcaacaacaaacttgaagtttccatccttatcctgggtaatggcaagataagtaaccggtccaagatacggatagaactgtgtcagatatccgccgcctgttttgccgtggaataccttcacgatcttcatggtaggcttcttgtcagaaatatcagcatctccgctaccggaatgaccgatgatacagatgtcatcattaaagtcaatggaatacatctcagaaagctgtccggttccggaaattgttttcaggatactcattgccatggcaaccttcatatctccctcaaccgcacatgcagttccctgcttgatcagcatagaaaatgccggaatcagcatactgtcaagaacgcctgccttgccctgagcaaatccgtcataatgggaagcgatcatgccaagatgctcgtcttttacccactgctcaaaggcaaccacatattttgccatatcccatactttttcgattgtgcccccgccttcgatctcaaaagtatccagaatgtcctgagcttttgcacggattgcgtcttcatctgtgatatcgtctgcaatcgcccacatcttttcccagtcaaactgcttggtataaaggaacattctgttatagaggtttgtctcatcaatgtacagatccatcattcccggatatggtctgccgatctgcgcaatgttagtctcacgaaatcttcttctcacctgagcagccttgcaccagtcttcaatctctgcctgaacagcaggatctccgccttctaccacacctgtgatcaccgcatgtcttttgcctgctctctcaaggtctgcaacagcttcgcctacagctccgcaggcatagccttctcccagccaggaagcaatatctgtatgctcataatccagagctttcagcttctggacgtttaccagcactacaggaacatccagatcgcggattgccggaagcatattataagatgtagcataagtcagcatctgaaggaatacaagatcaacgtctgcagcgcggaatctgtcccctgcctccattgcctgttccttggttgtcaccattcctccgtcaatgatctctaccgtatccggaattgtttttttgaatgcagcatactgtgcctcaaactccggtaccagtgacgggaactgtggaaggtaagctcccagtgcgattgaaaatacgccgacttttgctttcgtattaactaacataatgaactctcctcttcatataaaactataaagctgtttatgcgttataaattttgatattaaaggactcgtgaattactgttcttgcttcttcaatagatttgaattcctctgcctttaacatctgggcagtgatattaccgattgcagttgcctctcccggacctgcatgaacctctttgcctgtagcttttgctgtcagttcattcagatatcctgcattggaaccgccgcctacaacatggatacggctgtaggttcttcctgtgatctcttccagttcttttgctgtttttgcataacattctgcaaggctggtatagatcacagtagcgatctcaccgagagtctccggaaccttctgtccggttctgcggcagtaatccttcacttcctctgtcatatttgccggtgccaggaagcactcgtcatttgcgtctactctggacgggaaatcctttgcatcttctgccatagcacagatttcagcaaaaccgtatttatcattgatctcatgacgtacagactggatcatccacaggcccatgatatttttcagatagcggaaacgtcctgcatatccgccttcgtttgtcagattcagagcacagctctctttggagcagtctgcagtctctctctcaagccccatcagtgaccatgttccggaactgatataaataaagtcatcgtcatttgcaggtactgcaagcacagcagaaccagtgtcgtgagttgctggagcaactacttccagatcaaaaccaacctcgttcttcactgcttcagaaaaatgtccgatgcttgttcccggcatgatcagcttctggaaaatctttctcggatatcccagcttgtcgatcagttcaaaatcccagtcctttgtaacagggcttaccagctggctggtagtagcctctgtatattcgcaggattttactcctgtgagaagataatggaagtaatccggtacatgaagaagggtttctgcctgctccagatactccggatgctttgtctttactgacataagctggtagatggtattgtaaattgctttctggataccagttctctcatacagttcttcctgggagatcactttgtacacttcctggtccatgccttctgtacggctgtcacgatatccaacagtgtttccaagaacatttccgtctttgtccaggagaacaaagtcaacgccccaggtatcaacacccatgcttaccggaatcttgccgatttctttacattttttcagtccgttgatcacctctttaaacaggcggtcaaattcccagcaaagttcgtcgcctttttttaccataccgttttcaaaacgatatacttcctccaggatcatttttccattttccatatgtcccagaatatgacgtccgctggacgcaccaatgtctactgcaagataatatgttgccatgattaaaacctcctaaatatgtaagatatacacagaagaattttttattgtctgctgtgttttttagttcttccatatttgataacatcatattacatgaaaatacttcaaatcggaagaacctggtttgtctgaaaaagtgtccttatttgtcactgtccactctgtttccggtaatctgtggacagttccctttgtttgtcagctttcctgacagatatgtgttaatttaaaatatccccagagaatcctctggggatatggtgaatattgtgtaaaactcagagactagaaattagtcataaaggttcggagcgatttcttcgtcttccatgtttgttgcatcataccagtaaccagctgtcggaacatcagaaacttcatctccgtttgctgctgctgtcagagcgtagattgcatagtatcccatcataagaggagactgtgtaacagcaccaaggaatgtgccatcctgtacagctgctttgatgatagaaccagcgtcgaaaccaacaccgataacatcgcctgctgctgcgtcagaaccaagaacgttcaggttagcgttagctgcaagaacaccctctgctgcaacctggttggaaccaaagattgcgatacagttttctttggaaaggatagcctgagcctctgtggagcaaagctctacagttgtctgtgccggaactgcaacctggataacaacgtctgcgtcagcttcttttgcgtcagcgccttctgctgcgtttacatagaactcgttacctgcaactgcaacagtttttccgtctgcctggataagctcgatcattttgttgatgaatccagcgccacgaagctgaatgttctgagctgtagcatcctggtttacttcaccgatgataacctgaccttcagcgtttgcgataacgtctttgattgctgcatacatattctcagctgctactgcaccagcctgagcgttgtctgtaacaacctctgctactacagatccttccggagcatctgcaacacctgtatcaaatgttacaaccgggattccgtctgctgcgcatttcttaagagcatctgttacagaagatgtatcgcatgctgcaagacccataccaaccggttttgctgcgatagctgtattgatcatgttaacctggtctgcgatatcggactcactgttcggtccctgtgctgtgaaagtaacgcccagctcatcagctgctttctgcataccttcaactgctgcctgccagtatgtagactggaaagatttaaccatcatcgggaattcatatgcttcgtttgctttcagtccctcaaactgagctgccggatcagcagcgtcttctgttgttgcttcttcctcagcagctgcgtcttctgtttcagctgcgtcttctgttgcttcttctgctgcaaataccggagcaactgtcataccggataccattgctgcacaaaggcctaatgcgatgagttttttaattttcattgttctacatcctccttaaaaattatatagtttttagtttttatgatgatccgtcaggcgttttcacctgacggttcacatacgtgattaaaattgaaaactgtattctttataatgctgcagctttcttttctttgatgatatcgatcagtaccgcaacgatcagtacaagacctgtgatgatctgctgccagtttgcctgtagtcccacatatggaagaccggttttcagaagcatgatgacaaagataccaacaaaggttccaagtacagatccataaccacctgtagctgccacaccaccgacaaatacaccgccgatggcatccatctcaagaccggcgccagtacctggctgtacggtaggagttactgctgcgtatgcgattgctgcaagacctgcaaacagaccgcagacaacatataccataacatggtagaatttaacattgattcctgaaagagctgctgcttctttattggaaccgatagcgatggtgtaacgtccgaatttcgtatggttcagaacaaattccatcagaagaaccagaataaccatccacaggaaaccgatcggataacggtcagcgcttcttcctgtaccgattgtaagtttaaagatagaatggaaccatccgccttcctgtgtaagacccggccacggtgtagcggtacagagagatccggcaccgcgggtaatcatacaggtacaaagagttgcaagaaacggcggcagattcattacgccgataagaacaccgttcagtgttccgatcagaactccaagaagcacacaaaccagcatagcaacaacaacaggtacgccatggcttcttatcagagttccgccgatcagtgcgtaacataccatacctgttccgatggaaaggtctacgcctccggtaataagagggaaagtaacaccgattgccatcagaagatcatagtatgaaaaatccagcaaactcagcaatgtgttgtactgtctgaactctttactcataatggagaatacagctgtcagagcaataacaacaattaaaacgataaatctctgatcacttaatatactttttttcttcttagtcatgactgtcctccttaatcaatactacgtgtagccttatccatgatgttttcctgggtagcttcagaaatatcaatattacctgttactttaccctcacacatgataatgatacggtcactcattcggagaacttctgtcatttcagaagagatcatgatgattgatttaccttctgctgccagtctgttcatcagtttataaatttcattcttggcaccaacgtcaatacctcttgtaggctcgtcgaagatcaggatttcactgtctcttgtaagccattttgcaataaccaccttctgctggttaccaccggaaaggtttacaacaagctggtctgcggtaggagtcttggttgcaagctctttgatatatttctcagttacttctttttctttcgctgagtcaatcaggaagccctttgtaaactgttccattgttgccagagttgtgttctcaatacaggacttctgtacaacacatccatatcttcttctgtcctctgacagataaccgataccatatttaacagcatcctgcggactgttgatggtaacttcacgaagctgtccatctttgcccatgatagaaatctttccgctctgcttcggatctgcaccaaacagtgctcttgctgtctcggtacgacctgcgcccatcagtccggagaaaccaaggatttcgcctttgcgaagctcaaagcttacatcctgaaccatcttacctgcattcagatgttctactttaagaacaacaggcgcatccggcgcaaccatactgtgctgcttcggatcctcataaataacacgtcccaccatcatgttgatgatatcttcttttgtactgtctttggtgataagagttccaacataaccgccgtcacgcataacagtaacacggtctgtaataaccttgatctcatccatacggtgagaaatatagacaatacccagacctttttcacgaagatcacgaatgatgacaaacagatccgcaatctctttttcagtaagggctgctgaaggctcgtcaaagatgataacctctgctttgtgggaaatcgcttttgcgatctcacacatctgctgtttaccaactgtcagattatgcattttttcttttggatcaatatcaatattcagatcctggaacagttttttggaatcctcgatcatttttttgtcatcgatgcggaaacctttttttggctcacggccgataaaaatgttctgggcaactgtcaggtcgcctaccatgttcagctcctggtgcacgattaccacaccggcatcctgagcttcctttgtgttgtgaaattctgtttccttgcctttatagacaatggatcctgaatctttctgataaataccggtaagaaccttcataagtgtggactttccggcaccgttttctcccataagcgcatgtacttcgccgcgtttcacttcaaaattaacgtgatccagagcatgaactccaggaaaggacttatcaatgtccttcatagttaaaataacttcacccattgttacatcctcccttccgatcagttctttctgcgtcttgcagaaacgtcagcgtaaactgcaacgattacaataataccggtgatgatcatctgctgtcctttgccaagaccaaatgccatgattccctgctgaagaagagaaatgatgaacacaccgatcacagtaccgccgatggaagcaagtccgccaaccatggatgtaccacccattacgcagcctgcaatcgcctcgttgttgtactgatcgccgtaacctggctgaacagttgtatatgtagctacaaagaacagtgcggcaatacctaccagagttccgcagatcatgtatgaaagcatacgccattttctggtgtttacaccggaaagacgaaccgcctcactgttagaaccaaggcagagaatataacgtcccggttttgtacggtaaaggataattccgcagatcactgctactgccaggaagatcacaatacctacaggaaaatcattataggaaacaatgtttctgaaccatccgttttccggatcgctgcccataggccaacttacagactgtgtttttgtaaatacagaagcaagacctttggcaatattcatagatgccatagatacgataaacggcggtacagacatgtaagataccagccatccgttaaaggtaccaaagcaaagaccgatcagtacacataataccatagctgctgcacatggaacaccatagcttgtcatgcagtaaccggaaaccagtgcacagcagaacataaccggtccgatggagaaatcaattcctcctgtagcgattacaaaagtaacgcccagtgacaaaaagcccaggaaataaacatagttcaatgtggatctgatactgtctcctaccggaaacttatctccaagaaccactttgaagactacgaacataagaatcaggatcccaacaagcagaatcctgttcaggccgagcttttttatgattggattttgtttcagcttttccaatttcttcaccctcctactgtttttcacactctctgtgttttcttaacttataataacgtgaaaacctgataattgtaatagaatatcttacaaaaaaaggtaaaatatttacggtaatgtaaatattttaccttttttcttgactggtatccccaaatttcactgtggattgccgtctgtttttgttgtttttagtgtattaaacggaaaaagcagtttttcaatttcacttgtgtacatattttccggcgtcaccagctgacagccggaattgatctccgcctcataggtttcccctctgagcagccgaactgtctcctgtactcccagataccccattttaaaagccttctgtacaacaattccctgaaagatcccatgttccatcaactggactgcttcctgggaactgtccacacctaccacctgaatcttattttccgctccggccgccttcactgctctggcagcccccactgaagaatattcattcatcccggcgatcattttaagaccgggatactgtctgatcagttccatagtaagctcataggatttatcatacctggaatcacagtacaccacatctacaatgtttttttcaaattttccaaggccttcccggaatcctttttctctttccacagcagtagaaacgccttttacatgggcaacaatggcaatctgatcctccggtttcagcagagaagccgcaaattccccaagtttttttcctgcctccacattgtctgtggcaactgtgatctcctgaatactttcttctgtataagagtcaataaatgtgatccgtatcccctgatctcttgcctcctgaagaagactgttggattctgtaaaactggagggagaaataagaatggcatcaggatttttaagaattgcctgtttcagtatccggttctgtccctccacatcattctcttcctccggagccatgatttcaatatccacatttgcctcctgcgccgacatctgaacgccctggatcagagacgtccagaaatcatttctgctgtccaccacttttggaatgtaaatcaaggaaagacgattctgtctttctgctccgtttttatgataatttaccgctaccgcagaaaataccaggctgagaagcaatgccacagcaatccattttccatactttttcatcacagcccctcctgttgtcccggtattgtaattgtggcagtagttccttcacctggtttgctttcataaacaattccatactcgttcccataataaagctgaagtcttttctggacattatatatcccaacaccgttggagtgataatccaccttatgtctttcgtaaatgtgatccagagtttcctgatccatgcccacgccgtcatcaattacctgaagtaccgcatttccgtttttcataaatccttttaccagaagaagtcccctgctctctttatatttcaggccatgataaatggcattttcaatgacaggttgtaaaaccagttttatgagacgtatatttaatatagaaggttctacttcaatccagaactccagtttgtccttataacgcattttctggatagtcagatagcctcgggcatactcaatttcctggcctatggataccagttcatcctcattactgatactctgtcttaaaagacgggcaagagaagctgtcatcagtacaacctcttcgttttttttaccttctgccatccagataatggaatccagcgtattatacagaaaatgaggattgatctgggactgaagagccttcagctcgctctttctctttgcttcctgttcccggatattctgtgccataagctcatgtatcctctgagtcataacattaaaagattttgtgaggctgccgatttcattttcagaatccactacaatatcggaaacactgaaatctccttcctgaacccgttccatggaatcacacagccgctgaataggaagcgtaatactttttgccacaaaacgggaaaaaaacaaagctactgccatcagcccaattgccaccagaacataaatactctgagcttcattgcttcttcgcaaaagctcttccactcttacacagtccacaactgtccatcctgttttttccgatctggaaatagaatacatttttttgttgatcccatccccccaggttacaatatccgatcctgcgttcatgacaaggtcaatattctctgtctgaagctcattgtaaagctgctgctgctgaggatgatacacaatatttccatctgcatccacaataaaagcatatccctgatttcccaccatactctggtcacacagctcgctgatagcgttgtaattcagatcgataaagaataccccttctttttcctgtcctgttcccatttctttgttacggattccccggctcagcgtgatcacccagggacgttctccgctgataatgtgctgaacatgagaggaagtaagataaacgctctccctgccttccagcgcattggtataccattcctgggaatgaatatccaggtcctgatttgtaagacgctgcccattgttgatcagcattcttccgttttctgcaataattcccaggttcagaatatcactccggctgtccagaattgtctcaaactgactgagaatacggtctcttgcctcaggatctgcagtatccccaaaaagatacttctgtacgtcttcattactggaaaccagataagaggtattttccatataatcaatataagaatcgatattctgattcatctgctggataatggtctgtgtatacaaagatgaattttcaaatacagactgtctggtatagcttaaagaaattacagttataataatcactgcccccagaagaagcactgacagcactgcaaaaataacgctctgaatacttttaaattttttaatcataagattgcccggctggatttctctcatcttctccgctccctggcatattctgtaggtgtgactcctgtcatctttttaaaggaaataccaaaatagtgagggtcagaaaatcctactttttctgcaatctcataatttttcatagtagtgttttccagaagttcctttgccttttccattcgtgtcctgatcagaacctctgtgaaagtctccccggtcatttctttaaatattgtactgaagtaactggtgctgatattcagataagaacagatatcgttcaggctgagatccggatccatataatttttctggatataattcatggccagccttgcctgcctctgtccggtagagctgttcatatcggaaagcagtttaaagattttcataatataatcttccacaatcctgcaggcactgtcaaaagatttctgcttcgtaatactgtggagaagctcatcccttccactgaggattctcttcatatccactgacacatcctcgcatacccgatcaatggttcttacgatctgctgtaaatacatacaggcacggcttttttctaccagagcctgacgaatagaatctctcatctcctgaaacgtactttccacctgctctttttttcctgtttttaaggcttcagtcagttcctccagaagccggtcaagaggaacaatctttacagaccgctgttccgccatatcgatcagcagattcccccccagaagataccggtactgcatcacctgctcagccatatcatgagacagtatcagttctcccggattctttacccagtcgccgattcccatggatacatctattcccatcacttctttcatcttatccttgatctccctgcagatctcttttgtctttccagtaaaatcacggctccatttttcctgaaacaggatacacaccctgtttccgccttcctgataaacaatgccgacctgttctctttttacgatctcatcactgatgttataaagtacaaaagccatcaacgcactttcctggcgtttctccatatccagctgatacatgtcagaataaatatcaatatcaaacatggccaccctgtatctcaccgccgatagatcaattcccatatttctcagacgttccagactttcctccacattagtggtacagtttaccagcgcttctatggcctttgagcgtataacctgggcatttttccggtaactctcagaagcctttgtaagcttttccattttctgcttttcctgtcgcttctggtccaccttttccttcattttattgatcacaccagtaagctccatagctgtcactggttttaaaagatattcactgacattatactggattgcctttttggcatattcaaattccccgaatccactgaatatcacgatcacaatatcaggataattgtcgtgaagaaaatgactcagctccattccgtccatataaggcatcagaatatctgtcagtacaatatctaccgggtgctcctttacaaattctgctgcctgctgaccgttctcacagtctcctaccagctggcatccgattccttcccagtctatattttcctttatggcatcccttaccaaaatctcatcatctacaagtaatatacgatacataaactataaaaactctcccgttctgaacatatagaataattacttatgatgtatcttaccacaaaccatgggaatatggaatatggcaaagttttgtttttcatgtccgttttaaaatcggcaggcatatattccaaaagaaaagccactgtccattttgcagaaacagtgactttttctctgataaaattataaatttgtctcaacccggttcatctgattttaatagctgaatacagtttctactgttcctgtgtccagatctttgctcagcattgcgctgtttacccgggcatatccggttctccagcctacacggcttgtctcatcgattactccatgatccagaagcatgtaaaccttatttccgattttttcagcaaattggatagtaactgcctcattatcattgaactgtccgcaggccacatttcccaccgatgcgtagtctgcctgagtaaccagctccgctggttctccgttttcattcataaaataaatacttccgttacgtgtaaaatatttatccatagagttaatataatcatacatttcgtctatactctggctcacaaccgttccatcttcactgacagaaaaagcaggtgcccgaagtccgtccattcctgcaacaacctctgcttccgttccgtctttttttaccttcataatctttccgcctgcgtatactgacccggttcctgcataggaaccataggaaaagtaaatatattcatctttaaaaaccatggacacaattgaagctgttccctgaaaatcatctgcatataaatccggttctgtggtacacagcgttttctgctgtcctccctgtgcgtccactacagcaagagatacctttccttttgtagctgcccctgaatcggcttctacaggctgataatagatcagtccgtcatgactggcaagaaagctgccgtcaacaagcttcgttctctctcctgtttctgcgtcaatactgtcaatgcaataatttgtactatctgaacagataatcttctttccatctgatgcttcaatccgccccagaccatatgtctgtgtctgtccactgttctgatcaatactgcagatttcgtatcctccgatctgatctacaggcttttcataaaagatccagctgctgtccgtaagaaccagcgaaccgccgccttccatatccccaatcatgactttttctccggaaaggctttgcatcataagcttatttgtttctccgacaatcggcttataatatcctaatgctgcacttccctcaaaactggcgctgtcatactcccagtaataaagagttccatcttctttttgcacaacattacctgcttcatatacaggagcaatatctcctccggcttcctgattttctgctgcctggacgatcattccgctgtattctcctgccgacactgccataagcattgccatacatacaccgactgcctgtttcacatactttttcatctgatttcctccagtttttgtctatatgtaataatttaattaatatcccgcagtacctcaatatgtggcagtttctgtggttctcatttttttatacacattctgaatctgtatgctgtttttatatgattgctctttcctgcctgtcaccgcaaaaaacccgccggttcctgcccaaaagagcaggagccgacgggttccatttttcttctttatttattgttttatattattttacgatcacaccatcttcatcccagaggtcatgccagtcgtttgcgccctcccagaggaatacctgaccttttacaaggcgattgttcttttccagagtagcaatttttttcatctcttcctctgtaagcggatcttctgtcatgcatttcaggttgcttacatattccatctcatgtacagagaacggaatcgggatctgtcctctctgatgagcccatttcagagcgatcaaagcaggatgaacaccgtgagccgctgcaatttctttcatttccggtgtctgaagatcagccacatcctccggacacatatctctctccggtctctgcggagaaccaagaggcataaatcctaccggctgaatatcatgtgctaccagataatcaaacagttcctgctgctggaagcatacatgaagttccagttcacaggctgctggtttgatcttcataagaggaagaacagcctcaagcttcggaattgtcatattggaaataccaatgtaacggattacacctttttccacaagctcctcacactgacggtatgtgtccataaattcttctacactgaacggtctggaatcaggatttctggaatctacgtcgcatcccggtgcatgatagtttgggaatggccagtggataaagtacaggtccacataatcgcactgaagatcctggatgctctttctgcaggctttttctacttctctgtgcatatcgttccatacctttgtcatgataaagagatcttttctctccacaacaccctcatcaaaagcagctttgaaaacctctccgatctgatcctcgttctgatagcatgcagcgcagtcgaacatacgatatccgcagcggatagcgcctgctacggcattggaaacctgctctgctgtaaagcggtcagaaccgaaggttcccattcccacgcagggaatctcttcacctgaggaaagtttgatttttggaattaatgtctgattaattacttctgccattttcttttctccttttttatattttcccgcattgcgcggaatttttataatttagtgactgtaatctgaggaagaattttttccatatcctccatacagaaaaatcctgtttcttcccgcatggctgccgccgcagaaatggcgcttgcctttttcagggtttccggaagggacagcccctccttcagtccgatggcaaagcctgcgatcatggaatcgccgcagcctactgtattgacagcatcgattttcggtacttccgcccggaagattccctcgtcacttactgcaagggagccgtctgctccaagggaaacagctacgatctccacgccgtttctgtggatctcctttgccgcttcaataatatcattaatatcatcgcagttctttccggtaagcatcctgatctcgtcaatattgggcttgatcagcgtgggagctgcctgaatccccatttccagaagctttccgcttgtgtcaaggatcaccttttttccggcgtcctttacaatttttacaagacgctgatatgcggttccgtctaagccttttggaacgcttccggacattgccacaacctctgcgtcagcaaccagcgtgcggaatttttcttcaaagccttcaaaatccttttctgtaagagtaaagcccggctccagaaattctgtctgcacatggtttgtctcgtcccagatattaatgcaggagcggctttccgcatccacatgataaaattcacttttgatgccaaagggcttcagggcatcctcgatgtaatttcccgcatggccgcctacaaatccggttgccacaacctctgccccgtaaatagaggccggcttggaaacgttcagtccttttcccccaggaacataactgcattcctttacacgattgacttctcccacctgaaagttttctactacataccgcttgtcaatagcggcgtttaaagttactgtcagtatcattttagttttcctcgtttgataaaagaatctttccttttacaaggcccggtgtcttaaagagctggaaggcttcctgagcctggctcataggaattttcttataaatgaagcccggatcaaatttcagctgtccggttgcaaaataatgagcggtaagctcccattcttttcccgggaacggagcgctgtaggacatccaggagcctgtcagtttaaactccttacggttcatgttttcccactgggcaggtgtaaaggaaaggtctacatgaggagtaccgataaagcatacatgagccttatttgcagccagctcaaaggccatatgcatggttggaacctgtcctgctgtctcaaatacatagccgtagcccttatttccggtaagctccatagctgttttcatgtaatcctcttttgtggtgtttaccacctcgtctgccccaaggcgttttgccagctccagacgctcatcgctgatatcaaaaaccacaacctttttggagccgaagatctttgcccactgcatggtaaacataccaatggttccgccgccaaggattgccacgcactgacctccctgataatcattctgcagaagtccgtgaagggctactgtagagggctcgaacattgcgccctgctcatagggaactgatgcgtcaaaaggaactgcgttctgctccggaaccaccacataatctgcattgcttccctgctctctggagccgataaagctgtaatgcttacaaagggaataattgcctttctggcagtcctcacatttcatgcagggtacaagaggagcgccggaaacacggtcgcctgcctttacctttgtaacaccctctccgatttccaccacatcgccggagaactcatgtcccagaacgatcggataaaagtgtacgccattatgaagtacacgtggaatatcagagccgcagataccggaatagtgaaccttgatctttacataccccggttttacctccggctccggaatttccagatactgcacgtcctcatttgctacaactactgctgctttcataataagaatactcctccttttattcatgttttgtcatcataccggccagagaccggtacaattccaaataggtttcataagttttgtcgtaaatctctttcaccctgagatcaggctcatgggttcttgttacactgacggtttcctttactgcctcctcatagtcctgatagaagcctgttcccactccggccaaaagggctgcgcccaaagtagtggctgtatcagaagccggaactacgatctttttgcctgtaatatctgccttgatctgggtccagagaagtgagtttgcagatccgcccatagcgcggagaacatttgcccgggcgcctgcactttccgccacttccagattatggcggagagaaagagccacaccttccatacaggcacggaccatatgtccctttgttttggaaaaatcaagtccgtaaaatacgccctttgcataaggattccagacaggtgaccgctcgccggccatgtacggaagaaataccagtccatcgcttccggctgctattttttctgcgatctcattaagctgattcaaagacgaaactcctgtttcctttttcatcatccgctcatagtccgcaaattcccgctcaaaccagcgcataacaccgccgcctccggtagtacctccctggagaagccatttacccggaactacatggaagccaaggatcagacggggatcagccttatactcgtcaagacagatactcataccgcctgcctgtccgccctgctcctgagtctcgccgggattgatcacccccgcccccagagttccgcaggctgcatccagacctcctgccacaacaggagtcccctctgcaagtccgcattcctctgcagctttttttgttactgttcccacaacatggtcacatgggacgatttccggcaaaaattctacagggatccccagcttttcacacatagcctcattccacttgcctgtccgcatatcaaagcagtgaagtccgtacccctgggaaagatcctggcttaccgctcctgtaagcttaaaagcaataaagctgttggactgaaggattttgtcaattttggcatacacctccggaaggttttctttataccagaggatcttcgctgtagtataagatggctgaagggagtttcctgccacctcaaagattgcctctgcgccgatttcctcgttgagacggtcgcagatagactgcgctcttgtgtccatccagatcggcgtattggtcagtacatgtccgttccggtcaatggcaatggctgaccagctctgaccgtcaatccccactcccgcaatctcttccggagcaacagacgcctcttcgatcacctgacggacagccccgcagacagcactccaccattcttccgggttctgctctgcccagccctcctttgggtaatacaccggataatccccgttggctgctgccagcacacagccgctccggtcaaaaagggcaaccttacaggcgcttgttccaatatcaattccaattaaatatgactggttcatctttttttcctcattattttatagtgttctgctttcccatgattctgtatccttaaagctgtgcaatggattttccatggataatggttgtccccagcttttctgtacggcatccggattcatttcctgcatgttccagacgttccagcataatccccgccgtagcctctgcgattttttctgtgggctgagaaacaatggtcagcttgggattacaggctctggcaaagggaagattgtcaaagcccaccagagagatttcctccggaatccggattcccagctcattaagcccgatcacagctcccatagtcatctcgtagttggtgataaaaaccgctgtcatatccgggtttttctgcaccagtgtttccattgccttaacgccgccctgaatagtgtaatcaccgtggacgatcagcgactcccgcacaggaaggttcaactcctccatggttttgcaatagcctttcattcgttcctgcgctgtggagatttcctccggaccgccgatgatcccgatattccgatggcctttttcataaagaagctttaaggcatccgaagcagcctgctcattgtctaccagaacactgtcacagacaacaccctggatttttcggtcaataagaacaatcggctttcctgttttctgaaaagctttcagatgaccaccctcggtgtctaccggcatattgatgatgccgtcaacccttttccggcataaaaactccacagcctcctgctccagcttcttgtctgtacggcagtcacagatcattgtcgcatatccgtgatttcttaaaatatcttccataccggtaatgatctcagcacaaaaggtattgttcagctccgggattaccactccaatggtttttgttgcatttgtcttaagattcctggcaacctcattgacctcatagtgaagttcttcaatagcttcctcgattttttttctgtttttttctctgacatttcctccgttgaaataagaagaaatggttgcaaggcccagtcctgttcgctttgcaagatctttcatggttgctgccatatgaatccccctgtcagctatctgtcaatatttcagtttcaggcttttccgtcgcatccgcagaccttcatgcgatacataacaagctccttgactgccttgatcgcagctttaccgtaagctttcggatcaatggtgttttcattttctgcaaaggtttcttttactgctttggaataagcgtcacgtagctctgtagcaaagtttactttacacataccgcgttttacacactctcttacctgatcgtcgcttaatccggatgctccgtgaagtacaagcggaacctctaccatctgacggatctcgctgacgcgctcagtgtcaagaaccggtgtgcctgcatagaaaccatgggctgttccgatagctactgcaagagaggtaacgcctgtacgctctgcaaattcttttgcttcctgaggatctgtatttgtatctgcctctgcttccaggtcatcttctttgccgccaaccttgccaagctctgcctcgcagggaatatcaagggcgcgggctacgtctgcaactttttttgtcaaagctatattttcctcaaaatcaaacttggagccgtcgatcatcacagaggtatagcctgcgtggattgcctgcattgcaagttcaaagctgctgccatgatccaggtgaaggcataccggcacactggctttttttgcttccgccgcaacaagagctgcataggtctcaactgttccatattttactgtagatggtgtcgtctgaatcataaccggagccttcagctcttccgcagcttctatgattgcttttaccatctccatattttccgcattaaaagcgcctactgcgtatccttccttctgagcctttaacagcatttcctttgatgtaacaagtggcatgataatttcctccttagggtaaaatataatggtgtaacctgcatttttccagtatctgtttatttcggcctcttaaaaccgaaacgtttctgtttgagctaatcatacatcgccgaaacgtttctgtcaacagtaaaatattcatcttttacaggaaaatattctattgtcaagaactgcagatacaggtaaattttatatcagaaaaatcttattcttaataaatggaggtattattatgttaaaaggaattcctgaaatcttatcaccagaattattaaaggtattatgcgaaatgggacacagtgaccgtctcgttattgctgacggaaactttcctgtagaatccatgggaaaaaatgccattaccatccgctgtgacggacatggagtaccggaaatcctggaagctatcctgaaggttttcccactggatacttatgtagagcatcctgtaaatcttatggaggttatgccgggagatactgtagaaactccgatctgggatacatataaagaaatcatccgtaaatatgatgacagaggagatgctgttgtaggaaacatcgagcgttttgctttttatgatgaagcaaaaactgcttactgcattatttccacaagtgaaaaagctctttatgcaaatgttatgcttcagaaaggcgttgtgatcaacgactgattctgtaatctttgtacaaaatccgataacgcataaggaaatcccctataaacagggtttcctgtaaagcgaaaatcaaattttcctgattatataaaaaagtacagattccttttttgatatgttccctctttacctgacttccgtcaaagagggaacatatcactttaaggttcctgtacttttacttttaccgttttttaaaatgatagatgagaactccgacagccgcgcctactgctatggctgcaatccagagaaaaggtgcgggaattccggaagacgtttttacagtctgagccgatgtttcctgcgcattttcccctgcgctgttttccgtttttttgaccgaagactcttctttctctttgcttttttcggtttctttattgcctgccccggttacttccgcagattcaggcttttcagaaactgcaggggtaccctcggcttcctttttcccggaagcggtatcgtctgtcccggaagccttttctggtacagctttcggcgcggaagccgcttcagaactctctgctgcatccggagttatggaaagagccgcaactgatatttccggcttctcttctgtctccgatattgcagaaggtgttgttcccggttctccggcggtttttgaaacttctgcagaaggtgtttccggtttctctgtacttacagaaacagctgtatcagaagtttccgcatcttctgctgacaaggcgctgtctgtctttccaggagtctttccattttctgtgctatctgacatttctcctgattcagtaccttcctgttggtcaggattgttcacttcatccagattgacccatccctgttttccgtctatggtggtcacaccccaatagcttccgtcattcatatgggcatcctgagtaatatgtaatgtttcgccgcttttgatatcacggactcccggaactgtcccgtatttttcgcccggcccctgatatagtttcatatcatcctcttccgatacagtaatatcatagtccgcctgatagtttacattatctcttcctgccagatacagttctgaatcaatagcctcctgtcgggatgctgccgggcggcagtcatccaacggtacaaaaccattcattccgtgatactgtacatatccccaggtacgtttatgagtctcgtcttccacctcaccctcaatatgcaaagctgtgccattgggaatcatttcctcgctcagcttcgcagcttccagatccgggtttgcatagatatcaatgcctccggcttttgattccacaatcatatagtaatctgtcttataatccggttcggtttgtttgttctggacgtctgctgaaactgtcactgaaataatcatacacaatatcgccgcaaaccagattcctgttgttttcttcatctttcttttccccttgccttatgcatttccccgaatcacatgcctttgtgctgtttccctgcagactcattgattcttctgttactataaacaatcatagcacagtttttgtggtttgataatcccttttcgttctcatttttctgataaataacgacaaaaatgccgtccgattcattcacatcaacatgcccggagcacagctgctgacaaaaatatattatcaatatgccactgccctgccaatgatttttacttaacctcaaatcattctttctgatctgggattctttctgacctggttctcgggaagaaaacctcaaaaaatcatacccccggattccaccagggaaatctgcggttcagccatttttcacaaagcgaactccattcttcacagccacggataattcctcttccgtcttcatttgctgtcagctcgtttccaagtccgattccatgatacccctccggaaacagatgatattctgccggtatcccatattttgccagagcctgaacaaaacatatggaattatacggaagaactgtcgtatcctccatggtatgccagataaaggtttccggtgtgtctctgcttacctgattttccagcgacatttgattcctcagttcctcatacctgtctcccagcaggtttcggaagctttcctcgtgcccctctttccctgaggtgatcaccggatagctgaggatcaggccatttggacggatatcctctgcctccaggcccagaagttctgcaagctctccattattccagatggttccgagtgacgccgccagatgtcctcctgcggaaaatcccattacaagtatcttgtcctggtcgatcagccattccccgcttctttttctcagaatatttactgcctttgcaagctggcagagagctgttggataaacagccggagccacactgtatctgagaaccgctgtatggtatcccatgctcataaaacgaatggcaatggcttccgcttccctgtctgaggtcattctgtaggctcctcccggacagatcagaatcaccgggcgaacctgtcccggatacagttctttagactcttcccagaaataagtagtcatccaggcttcataatcttcataacagattcttattttttcatgtaacatttgcattccccttcacttatccaaaatttctcatgcttccctgattttaccacactgacagaaaaatggacagaagtaccgcagattttactccaggtaataatggatgttctgcatattttattgctttccggacaaaaaaatcctccggagagctccggaggatttttcatctggcatttaactgccgatataagtcttatttgtaaagaggtccgtagttcttgcaagcgcggaagtctgcgccctctttgtccattccaaatgcattccatgcagccggacggaagatcttttcttccggaacgttgtgcatgcaaaccgggattctcagcatagaagccattgtgataaggtctgcgccgatatgtccataggagattgcaccatggttagcgccccagttattcattacattgtaagcatccttgaatgcgccttcttttccgtcgcatcttggagcaaaccatgtgcatggccatgtgtagtctgtacgtttccagagagtatcagatacttcctccggaagagctacagtccagccctctgcgatctgaagaaccggtccaagtccttttacaaggttcagacggatcatagttgcaggcatctgatcctttgtttcaaatctggaggagaatccgcctccacggaagtatccattgtctgctgcattccatgtagtggcatccataattgccttctgatcttcttctgttacattccaccattccttcataacagcattgccgttttcgtctttagcaccgccgttagcatcaaggcagcatgcgccggagttgatcagatgaatgataccgccgttctcttttgcaacaccttcaatatcatatcctgttactctcttaactgcatccgggctccagtatgtacgaacatctgcgaacatctgtgcacggttggtaagaagtttcataaacagcattccaagaccgttgagaacgtcgttctctgtagcaaggatatacggctctcttgctccttcccagtcaaaggaagtattcagaactgcctctgcaaagtcgccgttcggatagaagtctgtccactgtctctgtccctggaaacctgctgcaatagcattgtggccgattgcttcctctgagaatttcggatcaagattatcacagccgttcatcagctctttgatgataactgccatcttaacaacaaactcaaactgctcttctttcttctcttcggacatctgaagctcttccgggttcttgtcaaatccgatcgtgcatgttttctttgcccatgcaagagctctctcaaattcatcatgatcatagatgccctctgtcatacgacggatgatctctacctcgtcaacagattctacgcgcattccaagataagactcaataaagtcggagtcaacgatggatccgccgatacccatgcagatggaaccgatctgcagccaggattttcctctcatggaagctgctgcaactgctgcacggccgaatcttaagattttttcttttacatcttccggaattgttgtgtcgtcagcgtcctgaacctcatgtccgtagataccgaatgccggaagtcctttctgtgcatgtgtagccagaacggatgcaaggtaaactgcaccaggtctttctgtagcgttgaagccccatacagccttgattgtctgaggatccatatccatggtctcagatccgtagcaccagcatggtgtaacagtcagagtgatatcaacaccctctcttctgaatttatccgcacatgcagcagtctctccaacacgtccgattgttgtatctgcaataacaaccttaaccggctctccgttggaatatcttaaattctcttccagtaattttgctgcagacttagccatgttcattgtctgctcttccagagatcctcttacgtcaagagcgcctctgcggccatcaattgtaggtctgattccgattacaggatagcttccgattaatctgcttttagccataatgtttattacctccatatttaagttcgtttgttccggaaaaatctgctgctgttccttccattcacggtagtaaaccaaatttcactgtaacttgcccttggcaacaaaattcagttttgtatatctcaggatttttgtatgttcatatcaaaacatcccggacaacggtaccatgtaaacatcagacagaatttctcccgtgtttatatgcttattatacaattgcaatattataattacttgtgttataatggcaaaaaatagtataatattcacctttttagaattatgtataaaatttctataaactgtcggaaggaggctcaccgtcttgcatgatcttgaccggaatgaaaacagaaaacgagggacttatgagttcccatttgaatttcatcacattgattccactcatccccgctatgtgatgtcttaccactggcatgtagaatatgaactgatgcggatactcaaaggaactcttaccgtcactttagacgaaaaaagtttcacagccacagccggagatatcatttttgtacacagcggaatccttcacagcggaatgcctgatgattgtgtctatcagtgtcttgtttttgacggaaacacatttttaaagcacaactctgtatgtgccggttatatgcagaaaatcatccatcaggaaatcctggtatatcatcattttacagatgaatcaaaagatatctgtgaaactgtaaacagtatttttgactccatgtggcagaatcagcctggttatgaacttactgttcttggacaattttaccacttttttggtatcgtttttggtaaacattactatttggaaaatgtgcaaaaggcacgaaaagactataagaggattctccagctgaaacaggtactggaatttattgaacataattatgcatcgccgctgactcttcaggagctttctgcctctgtgtccatgtcacccaaatatttctgcagattcttttcggaaatgacacaccagacgcctatggattatctgaacaggcagcgaatcgaacagtcctgctacgagctttcaaccaccgatgactctattacggaaattgcctacaggaatggtttcaatgatctcagctattttatccgtacttttaaaaaatataagggaatcactccgggaaaatataaaagatcttaaattactctgctgcaaatacaaaggagcgccaaagcgctccttttccatccatctctttttcctataaaacctcattaagaactgacagtccgtattctgccagactgtggtcttcctcaccggttcctccgctgacgccaaggcctccgatgatggtatcgcccaccttcagcggtacgccgcctccaaagattacgatcttgccattgtccattttatccacaccgtagaaggttccccccggctgagcaagaacactcagctcctttgtggacattttcaccgcaacagaagtatatgctttcttggtcgccacatcaaagcttaccagaaaagcgccgtccattacgtgaactgcaatgggatttccttccggtccgcagactgcgatcactgcttttttgccccggcgttctgcttctttttcaattttttcaatcagacgcttggcgctgtccagagtaattctgccctggattcccattctttttaatacttcctggattacagcttcgcttggctgagttccctgattttctgccatgggtctctcctttttatcaccggatacctgtgtgttttcggatttttccaccttgtctgcctgaatggcatcgatatatctggcaagaacataaaggtaatctgccaggcggttcatatatttttttgttccgttatctgctccgaactttacactgaccgcagccagcgcacgctctgcccttcttgccactgtccgggcaatatcaagctctgccgataatctgttggctccgggaagaataaattccttcggtctctgaaacaccccctccagacgatcgatttcctgttccagcgtttccaccggagcatcttctattttataatctctgttataaggatctgccacacctgccataattgtgatcagcctgcgctgaatcttttccagaacagcaattgcgtcttcgtcctccatcattgtctttaccagccccagatggcttgtcagctcatcaatcgttcccacaagctgaatacggtcgtctgacttggatacattttttgtgcgtacaaggtctgttgttcccttatcaccgctttttgtataaatgttcataacgacatctccctgttttccccgtaaatagccttaaacggcattttttttaccgctctcgcgctgtttgccccaagatttctgcactgccagaaacgtggatcatttaactcaaatacattttttcctttgggaagctttgccatctgcatggcaatcctgcgctctgcaataccaattcctgaaccaagcatggaatcttttgcagcttcaaatgcaagctcatccatgtcggcatctctggaatgtatctcataaagaacgccctcttcttcaattcccgcacagatctcccttaaaaaatcttcatccggatctctggtgtatataataacagttggttttctgacgatcatgcttcctcctgaaactctgccgtctgtctgaccggtacggtcagctgcttaaatatgacattaacaaacctgtggccactgcgtttctcggaccctctgttccccggatatttccacgtccacagacgatccggtattctgcaagggcttctgtaagcatttccggaatctcaaagtcctcagcggaaccgccaaccagcaccacgtttgatatttttcgtaaatcatgttcaggagccacgattttcagcgcacgaacagcatttcttacaaataccttccgctttgcctctcttctgacctcaagaatcttttccatgggaatgtcttcttccaccttcagcatttcgccgggtgccagaagtaccacatgtccataatatcccgggtctatagactcctcaaaaaactgcatggaaccattttccagtctcatatgaaaaaggctttccacctttcccataggatatttttttatctgctccgccgtagtgcggcttcccaatccgagttctgtctgtatcagcatggtaacaagctctcccgctcctgcctgatgggtcgtccggactgtgccgttttcttccagcaccgccgcatctgtggacccgccccccatatcaagaattgcaaggggaagtcttgttcccggtgtggtcagcgctccaagagatgccataactgcttccacgcctgcaactacagccttcactttaagttcctgttccagtttttctgcaattttctgcatgggaaggtgctttgtcttcaccatggcagcgattcccactgccttttccatgcaggtttctccggcaagtgagccggatatctcaacaggggccagagtatctactgcaagaatgtctgtgatccttacctcctgatcccggtctgaagcaacatccgtcatactttttttgatacggtccagcatatttcccacgttggtattctgctgcccgctgatatcacggatctggcctgctttttggagcgtttccataatagaatctgctcctgtatcaatatttacacttaattctctgcttccgtggaagtggatctcacctgcaggaagaacattctctctgatgtttccgtttggggtgcggatcacaaccgcgctcctttttccgatcaggctctttgcaataggagtgactgctcttgtttcctccggattcagtcccaggagagtggcaatgccgtaaggattgctcagcatccttattccggttcccggcagagctacctcaatagcggccagcttatcttccggaacccggctgatatgcctgacttcatcaataatgggaatctgcttgttcagacggttttccacaagtactgcctcatcagcctgaaggatcagcccccggatatcaagttccggaatatgctggttcagccttgccgcaacctcctcataggagaacttatttgctgccactacaatatagggaactcccgttttccccttccagatattttccagatgaagaagataaccggatgcctcacctgctcctgccggagtggaaggattgtgcccgatcatggaagattcggtaataatggtttctgtaatggtctccattgccgtatctccgatcacaggggctgcctcattaaggcgcacaagatcaagggcgcttaaaggctgcctgattttatccagagcctcaagaagcgcggactttatcccgtgaacatttggcagtgtcccttttgttccggttgtcatcctggaagccccggagaggaaatggaaacttccatcctctcccacacttccaatgcatacttcagttgtggaatttcctatatcaacacccgcaatcagtttcaaagaagaattccccttttttcataaatctctgctgcttccagaaccagctttgcacagtgcggcgcactgtatttttccagaagctcctgtgccataagtacaagctctgttttagtagaacggttcggacgcagtttgttgtacatgttcagtattacctcgtcaggtacgttggcaagctcagaagctctctggaaatttgcttccatctgaggattgtccgcttcctttgccacctgtccctggcgtttcagcatttccggagatatcttaatatcctccgcctgtacattacctctttttacttcgtccagagtaatgtcagaaagcttttttcctgttttggaggtaatggtatctgcttcattctgtcctaacggatagctgctcatcttattccctcccattcgatcattcctttttccggatccagctgctctgtttccacaatgtgcatcagcgctgcctttacctggtatttcgcacgtaccatagggtcgttggtacactcaacaggcgtaaccttttctccctttacatactttgcggcattctgtccgatcttacggtaggtttccagatccataagaggcgcctgtggaaaaagctccagattggaaagaggatacagatccttctgatgaatgactgtagttccctttgactggattccgatgccaatgccggagccggaaagcttagcagcctgaagcgccataaagcatacgtccgaagtatccagaacctttaccacacgggaggtcattccctcttcctcaattcctgcttttacgttacggagaacctcatcaagaggaattccgcccatagtcttatggatttctgtctgaaaggctgccccaacaccgatcacaatctctcggggatctgttccctgagccgccctggctgcattgtcataagaatgtttcggacgcatccgtgttcttccggcaaggcttccggatccggatgtttccggtgtctgaacttctttttccggctgtgcgccattctgatgaagctgctccacaaccgcctgagtgatcgcacggatcagttgttcatttacttccatagcgcacctcctaaaattcgtttacattgattctgtgaggaattgccttgatctcctcccagcgttttccggaaacacgatatccggttcccggccccatataatcattcggagtatttacaccggacattacctggaaatgttcatccagaatagctgccgtatgcatataatctccgataactctctgtttcagcatgttcaggatattttctgcaagttccgtataaccgctttcagcaagagcctttaccacatcaacgcctgtaatgccgcgcttcatcatttcatccgcagacatcaggtctgccgcagcgtcacgcttcagagtatccctgcttccatgagcataggtaactgcttccacctgctcgtctgttatctcagttaaaccaagatatttgaacacggcctgaaccgccttgcctgcagtgcggcgcacacggatcacatcttcctctgtaacagggcgaagacctccgtccacctgcatatctctctgcattacgttataatcgtcaaaatcctcggcgtcaaaattggagcctgcgaacatattgtcataatttggctctgcagcatatccggaaaaaataaaatctgttcccggcataaactgaagcatggttcttgctgttcttctcatgtcagaattggaaaaactctgatcattggaggatgcacattccagtcctagaagggctgcaacaaggttctcgccaatgacctcacggattcctgccggaacgcctgcagcaacaccaatgcagcttacagaaccattctggattccctggcttcctgctccctttgtcacataaaggcagcggcactccagatacagcatggacttcatctcgctgcttcccatcagcacttcgcttccggcgccggaagtaaagcggactttcagtcctctggatgcataagctgaattcagaaacgccttggaatacggagtatcgtctccgtcaataaataccttttccgtgccataaacagaaagggtctccgcataagtggtaagcccgcggatcccaagttccagttctgtagcttcctcagccgaacactgagtcagtactcccggacgtcctgcctgggaaccgatcagaagagccattgcgctgaacggcgcataacgtgccacacccatggtagtctcttcttcactgaaacctctcagggcgccttctgcagcgtctgctgcgatctgaaccggatcatccttcaggtttgtaatgtgagcctgatttcccggaatttttctggcgcgcattttctgcattcccatcatcatttccaccacattcaggcagttgataacttccgccatctttgcaggagtaataccggatacgatctccagtatctccttacgggaaacattgatatctacgatctttctggcaatttccagagagggaaccgccatagacgcctctgctctgtctgtgcggatcgcgtaatccgcaatgaactgatccaggaagtcaaagtcttctctcttctttccgtccagttctgtaattatattattttctatttttacagaaggcttcggatcatagggactgtgcattgccacaaatcccatttccggccattcgtcaataaatccgtctttatttactgcccggcgatccaaagcctcgattcttttcgatcttttcatatcgtctaccttttcagaaaagtctgtctcagattatatctgccttcccttttaaaaggaccacagctttgtataaatttttataatatcttcttttgtcggcactcgtgggttggtaggtgtgcaggcatctgcaagagccgcctctgccatcttgtctattgccgcaaagtaagcatccggtgtaatggttccgatttcctgaatggtaagcgggatgttcatttctttcagcatgaactggatccagtttacaagtgaacggacactcattactttattataattgctcagccccagaatatgggcaatatttgcataacgcttcactgccggaaggtattctttctggcttctgctgtgcttattgatgtttgcattaaattccacaatatgaggaagcagcattgcattggctcttccgtggggaatatggaacattgctcccagctgatgcgccatactgtgagtgattcccagacctgcagtgttaaaggaaaggcctgcaagacaggaagccacatgcattttctgacgggcatgcatatcactgccgtccagataggctctgagaagaaatacgccgcagatctcaatagatttttctgccagagcagaagaaaattcattatgatctatgctgacataggattccagcgcatgtgtaaatacatccattcccgtgtctgccgtaatagacggaggaacactttttaccagctctgcatccagaatcgcctcgtctgctgtcaggctgtctgaaacaagcggatattttacttttgcctctgtatcattgacaactgcaaaagaagttacttctgatcctgtcccgcttgttgttggaattgcgatcagccctacttctgcatagtggttgatctttaatgcaaactcacggatggcttttgaggaatcaatagcggaacctccgcctactgccacaacaacctccggctggaaactcaggaatttctttacgccgtctgcaattttatctacaggcgcatccggtactacattgtggaaaatatcatattcttttccgcctcttgtaagcggctctgttatcaggtcgatcattttgctctgaacaacaaagggatctgtaatgatcaggactcttttataaggaatatccttcagtctttccagcgcgttctccccaaaatggatcactgttttcatctcaaaagtattcatgtctgatgctccttttttatggctgcttcggataccggcattcaatttcggcattggtaaaacgtgcaagccatttttcagacggccttttgtctgttaccactacgtctaaatcacgcagctttcctgccacagaaaaagcagtctgatcaaatttggtactgtcaactaccagaatttttttgcgtccggaagcgatcatggcttttttcgttgtgccaaaagactcctgggattccatgattccccattcctgatcaagcgccttacaggaaaaaaacaccttgtccacataataggaacggataacttcctctgtcctggatcccagaaacgcaagatatccttctttcatgacaccgcctgtggaaatgatattccatccggatacatccgaaagctctatcaggatttccatggaattggtgatcactgtaagtctttctttatcctttaatgcctttgcaataaaaactgcggtggtgcttgcatccagaaaaatgtgatccccgtcctgcaccatttctgccacaatctccgccattttctgctttccgcctacattctggtttttgcgaatattaaagggcaggtcaatacttacattttcattaataacggctccgccatagctttttgtggcaagcccttccttttcaagcttgtcaagatcccggcgtattgtttcttctgagacttcatagagctggctgagttcacttactacaacccgtctttctgtctgaagtttctcgaggatcagattccgtctttctaatgccagcattttccttgccccctttttgagaactttttataaaatagaatcaatcatgcgtctgtccggatgagcaattacagaagagtcaaggtacatgcctttttcggcaacaagctctttcgctctctgaatggacgcttctactgcggatacctctccggtaatcatcatataagattttccgcacataccctttgcaatacgaagctcgatcacatctacaatggctgttttggcagcctggtcagctgcttcgataatagataccgcatcataggtttccagaattccaagcgcgctgatatcctcgatcacagtggttccgtacatagccggaaaaagtgattcatgaggatttccaagtacaaaactgtcaatacatttatcttcgtaagtggtaactgccgcgtcaacagccgcttttaccgcacttaaatcaccggtgataattgcaatatattttcccggacatacggtctgcgcctcaacgatttctacgtcagaggtctttaccatggcatccgctgctgtgacacctgtggcagtggttttaaattcaatcattccgattgctttactcatgttctgcacgtcctttctactttgctgcaattatgatgtagcggtctgttacttcagttacttttccgcagatacttgcatgaatgccgacgcttaatccgtcagcaggctttgcaatcatctgacctcttgttacttcatcgcctgctttcacaattgcctgtgccggagcgccgatatgctgactcagaaggatcttaaccttcggaacagctaccagagtctcatccatcggtgcatccttatcatattttgtcagtccaagccgtgccatcagacgttcctcaggaactttgcggtattctctggactgctgcaccggtaccggctgtacaccctgcgcaggtctgattcctgcttttctgagtccgcccttcatatccgccagcagagttctgggagccaggctctgagggcaggcatacatctcgcagacaccgcaggaactgcagaaatgagaatccagataaggattcagatctctgaaatcaccgtttgctgccgctctcatgaaacgcgccggatcaataggatgtcccagattgtttctcgggcagagatctgtacaggtattacactggcagcagatagacgctgcacgttttaaatctatggaagaagttctctgcttcttcataacgatcagatgatccttcggaaggaccagaatcgcattcgttgtctttgttaccgggtcggaaccgctgccgatccgccccatcataggtccgcctacaaaatatacggcgtcctttgttgtaatttcaccggcctgctccacaacctcatccagcgtacatccgataggaacacggacagttacaggcctgcttacttctgccacaacagatacatatttgtctgttacaggcatctgtttttccagtgcgcggtatacgttgtagatcgtctcaacattaaaaacgataactccctgttcaataggcagtcccccgggtcttaccacgcgtccggttgcttcatagatcagaacaacttcatctcccataggataaacttcctcaagaagatgtatcctgattctcgggaattcctcaatatgctgctgaagcgcttttactgtctgcacataagattttttaatgccgatgatcgcttctgatgcgccgactgtctctgctacaagattgaaagttttcatgatctcataggcatgcttttccagcagctgtctgtgcagtttaagcaacggctcgcactctgcacagttcatgagaatggtatccgccttatccgtaagcttggcataagtcggaaatccggcgccgccggcgcctgccacaccgctgtcctgcattattttctgtaattctttgatttccatggcgttactccaatcccgcaccgtcatcaatgattccgactatcgccgcatcaataggtgctgtttcttcgccgcagccgattcgtgctgcgctaccttgtgccaccaatacatactctccgattcccgcgccgatcatgtcgatcgcaacaatctggctgagttctgatttcatatgatgcaccggctctacaatcataaatttctgtccgatcagcttctcacttttccgggtggaaaccacgcttccaactacttttcctacaatcatgtgagcctccgcataaatattcttcttaaatcctcctatggggatgcggcgcatatatcccaaaggatcttttcctgtgctgcatcccctgcttttcggaggaaccttattttataattgtaacggtattgcctgtggcgatcttcgccgcattggcctcatccgtatcaatatgcatttccagtgtaaagctgtcgtctacacggatctttacctgattaaagattgttccgcgctcgttgtctgcttttacagaaacaatatcgccgtcctttacacctgctgcctgagcatctttcggtgacatatgaatgtgacgcatagccacaatacagccctcgttcagataaatagcaccctttggtcccacaatggcaatgggagcacttcccttgacatctcctgattcgcgaaccggaaccttcattcccagtttaatggcatctgtggctgatacttccacctgtgatgctttgcggacaggtcctaaaatcctgacgttctcaatagcacgaagcttgagacctacgatagtaaccgtctcatttgatgcaaactgtccgcccatcagctcttttttctttgtaagctgatatcccggtccgaacaaagcctctacatgctcctgtgtcaggtggatatgccttgcggaaactccaatgggaaccatgaagccctggcctctgctctcatttttattaatggcgtctatcaccattttggtgatcagctctatgttctttgtttccaagaatacacctgctttccgaataaaaattcagccatgagccagacagccggatcagggaacccctgtctgcacaaaagtctctgacccttttacccggcctgtaataagtctggatacatgactgaactgcttactctgatttatttaagaaccggaagaatcttctcaacgtctgtatgaggtcttggaattacatgtgtagctacaagctctccaagtctggatgctgctgcgcttccgctttctactgctgatttcacagcgcctacatcaccgcgaaccataactgttacaagtccggaaccgattttctctgttcctacaagcgcaacgtttgctgccttgcacatctggtcagctgcttcgatagctgctgtaagtcctctggtttcaaccattcctaatgcttcctgtgtcatgatttttcctccttatcaatgatccattatcaggaaagtttcctgaattatttttccggctgttcagcctcttcttctgtctgctcttcagactgtttcttccatcggcttgcgctgagttccacaagcttgacaatttcctcatgtggccgcgcgatcactgcataacttgccggtttcttaattgccttggctgccgctgtttcaacagcttcggtgacagccgatacatcaccctgtacaataagagttaccaggcgtccgcccagcttacgttcccatgacgccagctcaacgtctgcagttttacacataatgtccagcgcatccatcgccgctacgacacctgtgatttcaataaaaccatatgctttattcacgagcgaactcctttacgcctgtatgtttgtatctgttatttaaacagtaggcagaattttttctacgtctgcatgaggtctcggaattacgtgagttgctacaagctctccaagtctggatgctgctgcgcttccgctttctactgctgccttaacagctccaacatcaccgcgaaccataacagttacaagaccggaaccgattttttctgttcccacaagagcaacctctgccgcttttgtcattgcatctgctgcctcgattgcagcggtaagtcctcttgtttctaccattcctaatgcttcctgtgccattttatttctcctcctgaatcaagtttatatatttggggactatgttctgtcagcttttatcaagtgcgctgatctttaacattttttccgttccctcttcagggttcggaataatatagtgctgtaccacaccagtcatccggttcgctacttccattcctgtttcaacggctgctgtcacatccgtcacacttccgcggaatttgatgcataccagaagcggtaccggcaggctgtctgcatttgcaggcttattcttatcgaatacctccagtcggacatttgctgccttacatccggcatctgccgctacaaaggctgtggccagcccaaacacttccagaattcctacagcttctgccattttgcttctcctctattctccggattattcattaacgatggcgatcttcagacctgtcattgcaaggttggtctcaagagcctcattgatctgctcaagcgggaacttatgagtgataagttcagacatcggaagtccgatcgcctttgctctcttgaggaaatcaaaggtagttgcataatctctcaggttgtatacccaggagccaaccagattgatctctttggagcagagatcaaaatgaggattgatcactgcgtctccgccgttgataaagaagccaagctcacagaggccgccgccgttgcggatgaatttataaatgtttgcatgtgccttcgggtttcctgtgcactggaatgcaaaatctgcaagatgtccgccctgagcctcttcaactgctgccgcaagagcttccacaccctgataattcataaagtttacagttgtgtttgcgcccattctcttagcaaactcaagacgctgctcatttccgtctactgcgcagatgttttcaacacccatggtacggagaacggcaatgcagatcagaccgatcggtccgcagccctgaacaacaactctgctgttgaacttcagaattcctgttgtttttgctctctcaactgcgtgaacaagaactgcacatggctcgatcagaatacgggaatccagatccagatcacttacattaaagaaagtagaaccgaaatttccgcctctgattaagatgtagtccgcaaaccatccattgaattttacatcatcatccggaagaagtccatatacatctgctccgcccacgtttttcttattcaggtcaaacattgtgatctccggatcatccttgaagatcatacaggtaacaaccttgtctcctactttcacagcttttcctgctgtatcaacggttacgtttttacccatggcaacgatctcgccggttccctcatgtccgagaactaccggaatcaggccaaacgggtcgtttttatattcatgagcatcagttccgcatacaccgcatccttcaactttaacaaggatatcgtcatctcccagttccggaatcggatactcctgaagctcaaaatgttttttctcggtcatcattgcaactcttgcagttttcggaattccgccgtttgctgccggagctgccggtgcggaagctgctgccggagccgctccctttcctgtcataccggaaagaacctgttttacaatttcctcaatatttacattgttcatatccattgttctattcctcctgattaacgaatgcaaaggctgtcagacattacgcagcgtcttctctttgtaaaagtgcttgcgcttgtaagtccctctcctgtacggctggcaatagtaaaggtacagaagccttctcctccgaatcccagcgcagaataggacgggccgttctttacaaggattgcggtatcgatcgctcttgcatattttgtgatattgtcaacatttttggagtggatatgtgcggagtggcggttgccgtgctccagccatacagcctgctctactgcatcgtcaaagtctcttgctcttaccataccgagaatcggcatcataagctcttcggcgatcagcgggtgttccttcggtccttcgaatacgatgcagcggatatttgccggcgcatccactccgatcatggacagaagtgttctcgcatcacgaccaacacatttacgattcagcttgccgcctgccagaacaacctctgtaagcttgtcctgttcttccttggaagccaggtagcagtcattttctgtaataagataatgcatcagctcatctgcaatggaagacactgcaacaatttctttctctgcaatacagggaagattgttgtcaaaggtacatccgtttacaatatcctgagctgctttgcggatatcagcagtttcatcaacaagtgccggaggatttcctgcgcctgctccgattcctcgttttccggaggaaagaactgctgttaccacaccagggccgcctgttgcggcgatcaggtgaatgtctttatgtttcatcataatatcgctggtttccagcgtcggtttctcgactgttacagcaatattatccggtcctccgctttccagggaagcctcatttaaaagattgattgcatagatagatgttttgatcgctgccggatgagggttgaatacaactgtatttccgcctgccagcatacccatagtattacacagaactgtctcacttgggtttgtacacggagtgatcgctccgatcacaccaaacggtcccatttcgatcagagtaagtcctctgtctcctgaccatgctgttgtggtaatatcttctgtacccggtgtcttatcagctacaagatgatgcttcagaatcttgtctccgacatttcccattccggtttcttctacacccatgcgggccaatacttctgcattttctttaatttttttgcgaatgcaggtaatgatcttttctctctggtccatggacattctctttacgatcagttccgccttcttggcagcctcgatcgcatcattcatatccttgaaaatcccatgttttccggccggagcttccgcaatctgcatttttgccataacttcctgtacaatttcctgtaccatgttctcactgattggcatgagattgtcctccttacttattccgtcagaattatttcattccaagctgtgccattacctgttttgtgatgtttgcgatcagttctgcatctgcttcctgagctcctgactcctgagaatgagcaaccatgcagccgccgcagttatgacagttgatgccgtctttgttctgacagagatctgccggatgtttgcctggaagtcccatttttcttctgatctcataaagcttttcgattgtctctttatcgaattccttcgggccacccagaagtttgctctggtacagaagctgtgcgtagaattcaacagactccattttcatgtatgcagcgttcagatctgtggaccatgtaagtgctccgtggctctcaagaagaactgcgtcaaaatatggaagatatttttccagtctgtccggaatctcgtttgtggaaggtgtgccgtactcagcgatcggaacacatccaagagcgataactgcctcaggcatgattggctgtgtcagcggaatacctgcgattgcaaaagaagttgcatatacaggatgagcatgtacaacagatccaacgtctggtctcttcttatatactctcatgtgcattttgatctcagaagaaggtttgaatcccgggttagcctgaatcacattaccctctgcatctaccttacagatgtactccggtgtcataaatcctttggatacgccagttggtgtgcagagaaactcattgtcattcagttttacggaaatatttccgtcgtttgctgctaccatgttgcggttgtagatacgtcttccgatgtcacaaatctgttttttgatttcaaactcgtttaccatgcttttttcctccttaagcaattaggtgtcttattttatttctaaggagattttactccttaaaaccaaagttgtcaaggaattcttgttgattcctgttgtttttatcagtattatgttgttgtttttgttgtgtttctattttttgtcattttccgaaaaaacatacaattgcatattttcttttatctccggatcctgatttcttctgttatcatccgttataatgccgatcttttatccgccgatctgaacatgcagggaagtgatactttctgcagcccgcttcagggttttcattttttctccgtcaggaggcagtatcccatccatcagatacgctcttcccaacccttcatatttatcctgccccagtctgtgataaggcagaagatgaagttctttcactccgggaagagaatctgcaaaagcggcaattccgcggatttcctccacagtatcattaaaggcggggatcaccggtacccgtatgatcagccttgtttttccggagagggcaacctttctggcattttccatcatcagctcattggtttttcccgtaaactgcctgtgcttttcgggatctgtatgtttgatatccatcagataaagatccagatacggcagtatctcctgaatgctttcaaaagacgcacacgccatactttcgattgccgtattaatgccccgctccttcgctgccctgagaagatctctggcaaactcaggctggcaaagacattctcctccggaaagagtcattcctcccccggagcgataataataaggcctgtctttttccacctcggcgatcatttccgccactgtggtgtctttcccgatcaccttatcctctccaagtaccttcatggtctgtatcctgtattcctgagattccggattacagcaccagcggcaccgcaggacgcagcctttgagaaaaacaatggtgcggattcccggcccgtcgtgaacagagtatctctgaatatcaaaaatcctgcccctggtatctaaataactcatattatgcctttccgttcatactctctcatattctgatccattgtcctgctcctgttatatttcgcccggccaccttcccgcgatcagaatccctgttctgttctccggataatatcatcctgaagagatcttgacagagtggtaaacagtgcgctgtagccggcaacccggacaaccagatgtttatatttctcaggatttttctgagcgtccagaagcgtatctctgtcaaccacattaaactgcatgtgcatgcccttctgatcaaaataagaacggatcagtgcggtaaatttctcaaggccctctcttccagccagcgcagaaggatggaatttctgattaaacagagttccgttagatacaataaaatgatccagtctggcaacggaatttgcagccgcagtagggccgtttacatcctttcctgccgaaggcgatacgccgtctgccacaggagtgtgggcatagcgtccgtccggcgtggctcccgtctgtcccccaagaggaacattcgcagaaaccggataaagccctgcctggaactgaccccctctgggattcttatagttctgaagaggccttgtataggtataagccacatctcttgcaaagtagtcaacctctgggatatcatttccaaacttcggaacctcatcgatcatatgatgaatttcctcaaaacgcgccttctggtcttctgaaggcttcatggtcatcactgtttccagcacggatttcacagcgctttcatcaatggcgcaaccctgacgctccatctctttcaggatagatgctgtcatatccgctgctgtctcactgtcgattccttttccgtaattccataaaagggcttctttatattcctccatggaaacttttttgtctctgtatacaagctgacgcactgcataaagagaatctgccatattggcgattccgaatccctgagggccggtaaagttatataccgctccgccttcctgaacagaaatccctctttttatacagtcatccaccatacaggacagaaacggcagcggacatctttctgcgtgagccacatcaatggcattatcagcgtttacaagaagagaaataaagtaatccatctgttttttataggcatcatagaattcttcaaaggtggtcatctctgtcacatcacctgtagcgattcccacctgctcccctttgtccattccattggaaaacacaagctccagaggacggcacatgttaaagaacgccgcgtcatgccagccgtctgtttttccggccttctgaggctccacacatccgatgatattgtactctctggcatcttcaagagaaagtcctctgttctgaagagccggaatgatcacttcgtcattataataggccggaagtccgattcccgttctggtcagttccgccgctttgatcagaaactcatgagggcttccgttccatactcttacagaaagagacggctggggcagatgtacatgcatggatgcctgaatacacatgatcgaaagatcatttgtcacatcctccccgtctttgttctgtccgcctgcaatgagattctgaaacagactgtagcctgcaaagccttctgccgaggcggcgtcacggcatttattcagatcgttcagttttacccagatgcagtccatcagctcctgcgcaaactctctggtgatatttccgttttccagatcctttttatagtaaggatacatatactggtcaaagcgtcccggtgagatggaatgaccgctggattccacctgaataagctgctgaacaaaccagaaagactgacatgcctcataaaagcttcccgccccctttgccgggacacggctgcagttaagagcgatcacttcaagttcgtttcttcttacaggatcactgcattcagcagccattttttctgccagcgccgcataacgctgcgcatattccatcactgcctggcagcttaagataactgcgcttaaaaagtgagatctccttgcataatcgccgtcgcccacgtgacatctgtccagctccgcctgggcttttgccatgatgccttcatatccgatagcaagaacttcctcgtattttactgttacatggcctacaccgttataaaaataatttcccggcgtaaaaatattatgttcaatggcctttattgcttccggagccatatatgaggttgccagctcactggtggtcttccccttccagtatttatgtacctctcttaactcctgttttgtttcttcggcaatataaaacgggtccgcgctcctcgtttcaaccgtatccagttcatcctccagccactggtaagaaaattccggataagtctgacagcctctcggtgctatggtactgctgcctacgatcagttcctcatcacggataatgatgggaatatgacgcagaatatgagcaaatgcctccgcacgcctggtaaccatgggttcgccttcggttgcctgataagattctgtaatcagtttcgctctggcagattcgatcaccggcattttctcatacagatggtcaaccagtcttgtaattctggctgattttggaatatctgtggtattaaacatttccacgcttctcctttctcacagcttttccggacaaaatccggctgccgcgtatcatatacagccattatacgccatccttccctgtgcgtcaacaaaaaacaacacataccgctccgttttgatgaggtttttattgtatttgatatgtgttttttgttgttttttatttattgtatttttccatgaacatttcaaaatccctgtgtcataatcctttcggctaaatttccgaaaaaaccaacttatatccgcaacaacagaatatccatactggctcctgacaacaagcttaaagactttaaatatctctttctgaaaccattgttttctcctgaaactttgatataaaaaaagagacttccgctcctgtaccatttctgccaatagtacaaaaccttccagtcccttttcacttgtctgttattcggttttctttttgattttaacctgtaaaaacgatattgttgtttacagtagcgagaatatcagtatcttctctctcatattattccccgggaataaatccatacaattaacagctccctcatactgcagctcatccaggccattgagatacacctcatattcctgagagggataataaaaatacagcctgagctcccgttgattttcataccaggattccagtattcttgccattgcctgtttgagaatctccagacagaatggattaaagaaaaagcatctgtccacctgtgcaggaacctgataagctgccgcatcctgctgcacaaaacatacttttccggaagaaactgcttttttctgattccgaagagcagtctggtaaaaccgctcattatattcaattcctatagaattacacccggtctgataggacaaaaagaaatccacacgcccttttccgcagccataatcaagaaccgtgtttttctttccgatctctccactgtttccaagcctttccaatactgaataaggcgtgggctcataaggatatttgtaccgatccgagcctgtatcatcccgccctgatgtgcggatctttaacagcctgtcccaggaatcttcattcataccaagcacttcctccttctatttctgagtttcattttccagatgctcctccagtgtaggatgcatatggcggatgaccataagagttgccaccatcagcacaattcccaccggaagggcaatccaggcagtttttacaaatcctgccaccagataggtaacaaaggatactgctgccgccagcatcgcataaggaagctgcgtagacacatggttcacatgatcgcactgtgctcctgcagacgccatgatcgttgtatctgagattggggaacaatgatctccgcataccgctcctgccatacatgcggaaatggaaataatcataagctccggatcagagccctcaaatacagctactacaataggaataagaattccaaaggttccccatgaggttcccgttgcaaaagccagaccacagccaaccagaaaaataattgcaggaagaatgttcatcaacccgcctgccgcagaacgcattgcattttctacaaaagctgctgctccaaggctgtctgtcatggattttaaggaccaggcaaataccaggatcagaattgccggaaccattgccttaaatccctccggaatggaatccatacaatccttaaaagaaagaactttgcgcaccatataaaaagccacagtaagaaccagcgcaaatgagcttcccagagtcagacctacagatgcgtcgctctgagaaaacgaagtgacaaaatctgttccgctgaaaaatcctcctgtatagatcataccgatcacacagcagactacaaggcacacaataggaatcacaagatcaatcactcttccccttggatttactctgccttccttttctgcatccgcataaggacgtccctctgttgtataaagatctcctttcagagcattcacctcatgaactctcatacttccaaattctgttttgatcagcaccatacctaccatcatcacaatagtaagcagggcataaaagttatagggaattgctctgacaaaaatagaaagtccgtcctcgccctctacaaatccgctgactgctgccgcccaggatgaaatcggagcgataatacacaccggagctgcagttgcgtcaatcagataagcaagttttgccctggatacatgatgcttatccgttaccggacgcataacgcttccaacagtcagacagttaaaataatcgtcaataaaaatcagaactcccagaacgatcgtagcaagctctgcccccactcttgttttgatccgtttgctggcccatcgtccaaaagccgcagaacctccggccttattcatcatgcataccatagcaccaaggatcacaagaaaaatcaggattcccacattatagctgtcagacagaacactgatgatcccaccctgaaaaatatgggtcacggttccctcaaaggaaaatccggaatacagaagacctcctaccagaattcccagaaacagagagctgtatacctcctttgtgatcaatgccagcgcaatggctactacaggcggaatcagcgcccagaatgtagcataaagcgcaggctgcgccgtctcctctgcttctgccgcaaatacagacaacggacttgccagaattcccagaagtatcattgtaagaacagccaggaatacttttcttttattttgcatatctttcctccctctgatatgaaaagagccatggatgtgtctccaagcggagttctccatggcagctgatccctgtctgatatttttatctgatcctgtcagtccctgatagcgctccacattcgtgacagtctgcagaatcttattctgcagcccagggcctcgccttctggcggtcaaaacccttcggcggtttttcctttcgccggaaactgcctgccatggcatgacgcaacttccctgtaggtatgtttgcatctgtttccgggtactgataaaacccgcacctctatcctgtactcttttatctaatttatttttatttactgtaacagcttttaagaaaaatagcaactgatttctgtgttttttgcagatttttaaaataagaaatgtgctattcccatatttactaatatagaattcccctgttaatattcttgattgaaaatttattgaattaataagacgcccttctatataagagctttacagacccctgacgccggcaatggcgcaggggcagacttgttttccggcgatacagaatcatcgccgatctcttattctttatcttgtgaattaaaatatacctctgctttttcctcaaatgtgtgaagagaatccgctcttgcagccagcttatgcaaagccttcaggacttcaatactttcaaggttctgaatcttcttctgcagctcacagggaatttctcccaattcctcaagaagttccaaaacactttcctgtgttgcctcgagtctaccttcctgtttttcctcccgcagcatttcttcaaaaatcatatagcgttctcccatttcccggtctgtcttaatctgtcgaatcgtttgctggaatttccgaaccagttcgtctccaaactcttcctcgctctccttaagattagccgttacaaattccaggaacctgacaagctccggcgatacttccgcagcattctctccttctcattaccgcgccaaacatgaaattatctttgatcgtcaggtcctgtaatgtttttcgtttcttcatccttcctcctgttctacagaggaatcctataggatgattatatcacgcactcactcagacttctatcttttttactaaaaaataattttatgccatcatctaatcatggctgtattctccattgtagaatattatacaacttgcagaggcttttatatttttaacctgcatcatttattttgcttccgggaaatacaactgctcccattgccaccaccaacgccagcaaaacagcgcaacccataaggattccattaaagaactgcatccacagcgcgccgatcaccagaggaaacataatattcagcatattggaaaaggattcaatcactccaaggactacaggggcatttttatctccctggcatacctccacacaatcgtacagatatccaaaggacaccggcgcaaacatgtcctttaaaaggctgatacagtagcctgtcataaaccagaagtttcctgtgggaatcagaaacagcgcaaccgacacgatatcaaagcccacatcaaaaagatacacccactttttatccagcctgtctgtaataagagtgagaaacaacgagcagatacagttaatcacagtaaaagcagctgtatatttcaaaaacacagaaatctctatctcccgggcaatcgccagaagcggtataaaacgcagaatcgtgccgtaaactcctgttgcgatctcggtcagcaaaaacatacgcacaacaggatctcgaatcacatttccaatctgctctatgtactcttttaaatgtattttttcctcctcttcccgctggatccacgtccgtccgttccaggtaaaaaccagagcgatcagaaaccccacgctcaaaaagccataggccgcttccatattccatttgctgatcagccagccgctgaaccatgtactgatcgctattgccccataaagaaaaatatccctcagggcaaaataccctgtccgttcctctgaaggtactgcaagattaaaggaatttcccgccgaataattaaacatgatcctgacacagtaaatcagaaacaggcccacaaaaaccgctgccttatactctgtcagagagattcccactgccgcaccggctcccagaagcaatgacaagcctcccactgccagaggtgaaaatttctttgagaaatatacgatcaaaagcggcagcacaacatccataatacttaaaagagaaagaaaaatcccatacagggaatctccaattcttttttcaaacaaaaatggaatattgttttccataccgccactggaaatataaaagaaaaaatatacaagtaaaatcagaaaataatttctgaatattggtttaaatgaagaaagtaattttttcatgacataattttatctcctgttcgtttcagtaatcatcagtacgtaccctccgatccctgtatttttaatgaacagattttataccctgaatccgtttctacaagatctatgtaacctttcatttcacctgttaccttcattccattcttattcttctggatattcatatgatactttagggcatcactttccgaaacagacgtaaactccagaacaacacgaaaatcgtatcgtttcacttcagaatcatataataaagtaatctcctgatctgtcagcctgatatcagagcgaaaggaagaggcaaattcacacaacattaaagaatacgtatctctcacggcattttcatatccttccctggtaaaagcttctttcatcggcatatcaagattattttcagacattcgttttttcgcctctttgagggatacattaaaataactttccagaaaatcgctgattaacttcttcatattaagttttcaatctccattccctttttcattaaccactaatactaacgggcatataaaagcatttttactccctggttttcccatccacagcaactatctgaaacttatggcatacctttgtaaaatactgttcaaaggaatcattatgtgaaataacagccatcccaatcccatactttatacaatactgtgttactctctctgtaatagtatccaccaattccacattcagcgcacttgtgggttcgtccagcaacagcaaatccggttttctcaaaagcgctctggcaattccaatcctctgtctttgacctcctgaaatattcgtgccattttcttcaaggagataatcttctccttttgtctcaaaaaactcctccagacaggctgtatagattgcttcttttatctcctgtttcgtgtaattctctgccagaaccaccttatttattactgtgtcccggaaaatatacggagtctgcggagcctgtataatatgcttatagtagctttgaggctgtattttctctactgaaatcccattgtactttatggcaacaggctgattatctgtatgataaaaacgtgagatcagattgatcaggcttgatttgccgctgccgctctctccttttatgataaggctttctcccttttttacagtaaaatgaatatcctgcaaaatcgttttgccgttgtggaataaatacccttccgaatcaaaagtcagagtattaaggttttctatctcactgttctcatataaagcaatttcactgctcaatatcggcagtattttctcctgcattgccaaagcctgttttctttgattaaaataatcaggaatcacctgtacaggctcctgaagatttcccgccagcgcataggcaatcagcagctcacctaccgtaaactgatttttcatcaccagcaatattcctgccaaaatcaccagtaccggcagcgccgttgtcaaaacagaataaatagaagtaaatattgagtaaaattttgcaattcttctgctgtgtttataattattttcatccacataatctgacagggaattttgaaaaaatccttcttttccatactgctttatatccttaaaaccatttaaaaaatcaataatcttctggttaagaactgaattggaaacctgcagatcataggtggcttttccgattatttcactgatataatgagtcgccagaaagcagattgctgtaaccgcaacaataaaaaccgttataaaagcattataagtaatcataataaaaaaagtaacaacaatgcttaacacattcacacatactgcaataatgccaatacttttccagtcagaaatcaatttgctgtcatcctttatcatagaaagcaaaacagaagaagtatatttctcatggaaagaataatcctttttcaacacccttccaaacagatcctttatcatcatataatggcttgtgtactgcagatccctcaaataatactggaatatgcaattaaccagaaaaaagagcaaaataagcgcagctatctttttcagataccccagagtgatatccatatctgccagagagatactgtcaatggctttttgagtctgaataagaattgcaaatttaagtaaagttgtcgccacagaaagacacaaggttcctgcctgtttctttctgataggttgaaaaatctcattgacctccggcaaaaatttctgcatatgtatttccccttccccaaactcttccgttatccaattctaccattgtcacaatcgccaactcccatttttcatttactaatcaccttcaataaaacattatatatgcctagtttttacagcagttgtgcatttgaataataagagcacagcatcttgtctacaaaaaagccccctaatcgtttctctgattggtatttttcataagaattgttctctcactttcagtaatgcaatagaattaaatatttaattctataatttttctttttaatttcccctgaaaatcttcctatttcctcttataggacgaatcagatttcccaataatagctttcccccctgtcgtaggcaatggcgcaggggcaaaattgctttccggcgatacagaatcatcaccaattccttattctttatcttctaaattaaaatatacctctgctttttcttcaaatgtgtgaagagaatccgctctggcagcaagttttagcaaactcatcagggcttcaatactttcaagcttctgaattttcttctgcaactcacagggaatttcgcctaattcctcaagaagttctaaaacgctttcctgtgttgcctcaagtctgccttcctgtttttcctcccacagcatttcttcaaaaatcatataacattctcccatttcccggtctgtcttaatctgtcggattgtttcctggaatttctgagccagttcatctccaaactcctccttgctctccttaagttctgctgaggagtcctataaggtaattatatcacgcctttgctcagacctctacttttttctttcgacaggaacacaccatcggcgaatatacaggccatacccaactgccgttgcaagcaaaagcccggaaatactaaaatatagcattctaatatcccacaccctcatcagcaatccaactgccagagccccacctattctggacagcagaataaaaaatcttgcagtagcaaaggttcttccaatatactccggctcactctccaactgaatctccgttttaaatccaagaggacaaaaagttgctgttatacccaccagacaggctcctataaaataaacccatatattatcagaaattccaattatgatataactgagggatgcactacaaagccccagggcaataacagaagacggcttcagctttctgatttttcctagtacaagagcggaggccgccagcatgcctacaccttccactgcatttccaataccataccaataagaagacatctcaagtttttcctcaatcatgataatttccaaaggtgaggcaacaccaatacagtacataaaaacattccagaaaattacagttatcagaatatgcttatttgcaaacagcgccttatatccctttagcattttgccacagcttgtattcgcctcctgtggtgcatgtacaaaaacaatgaaacaatacaaaatagcagttaccacatacagaataatgttcaaagcaagattgatattcacctcaaagcccaaagcaaggacagaggcacatagtggcgctgcaatcatggaaagggaatccaaaaaattaaccacagaagaagccttaaacaattctcccttcgcaaaagcctgagccatcatggcacttatagtgcttccctcaaattccaacagcaaattcatcccgaaagtaaccacataaatacaccagatattcctattaaataaaagccccagcattaaggctgcctttgccaaattactgatgaccatgagcgtttttttgttatatttatcaataattcctcccatcacaaaaataataaaagcaggtaaaaattgggatacaaaaaaaccaccgattacggctgccgattccgtctcctgaaacagatagattacaattccaatatcataaatatatcctgcaaatccagataaaaactttgctaatgaaatcaaacataaatttttcctattctgatttaattttgtattacacataaaaaattctcctttagtaaaacaagcatctgtgcattaaacacagatgcttgtttttttaatactctttgtacaggcctaaactatatacttcagtatagctttcagtcttaattcctgcatgtgcacttgctaacagcatctctcccacctcctttttttctttttgcatataataaaaaatattaatgccataactccagatactctcctgctttttcagcaatttgaagatatttccgttctcctaataacggatactctgttaaaatccaaaatattttttccattgctcttttccactcatcacaataaggataaggaaccgatattgttcctttttcctgaaaagtttcccctcgacatcttcctccacaaaaatatttcatattgcattctctgcatctcttattcatatttacaatatttaattcctggaactgttttctaacagtcgaattttgaaattgttcctgaaaatcagaatcaagaatattacacatttcaaattttttatcaaacaaatttaaacatggataaattcctccttccggagatattgtcaacgttataacccctgcaccgcatgataccattttttgcgaaaacttcgctcccataaccagtcccataaaggatgtttcatctaataactcaataatatctggtctcttttttattaaagaatacattctgtcaacaaactcatccaatggtactctttccacttgcccaacagctcttcccatattcatcaaagagatcaatcgtacttttttgatgttatatttttttgcaaaatcaaaatattcttctattttctcgatatttcctctgtgatatacaaagtttgtttgcatatcaacattatactcgttaagaatcctcaacgcatttattgctttattccatgtcccttttcccctaacatactcatgacttgcctcatcagtcccatctaacgaaatttgtacatttatattattcctttttgcagtttctgcaaatttacgatctattaatactccatttgtagataaaccaatctgatatcctaaatcagcagcataatctaataattctagaaatccatctccacacaaaggttctcctcctaaaaaagaaaggccttttttcccctcatccattaatgtaatacaccttttcaaaatttccttcgctgtttctaaagacattccttttaaatcctgttctggcatatccgccacacaacaatgtctacaccgtaaattacatttcattgtttgcaaaaaagtaattttgttgggctttaactcctttttatggttctttgaaattctcgtattatataagacattgctttctagtaatggagcaaaaaattcttctatttcctctattgccttcatatctgtacggcctaaaactttttcagcgacacattcaatactgccagtgtttttcatttcttgcaaagcaacaagcccctgtcgggaaacagcaatccagaatggaacttccggaaaaataacaatactattttcttctttcgttgaaaatatttcataaggctctaatctgaatttttcaaacacttctttcatagattttgtcccttcctttgtattaatctgtaatttttctcaactctatattttcaattctgcttttatccattttaatagtcatcgcatacatacacccaaaatttctctttgatattccctccccgtattaattatgttttattttttattattttaatctttaaattaaacaaacaccatagcgtaaccggtataaatcattttgtaccggttacgctatggtgttctatagctaaatatatgtataataaaataaataaatttaaggaaggatgtaattatatgaatctcaaaaaagtaaagctatttatctgcacattgatgctcaccatgacatttgtttctgccagccctgtatctgcttcagaaacgccctctgcaaacacaaacacgaatgaatcctctcctgaagcagaaaccacagaaaaaatcgttccctattgcaatttagaagatccatcttaattcatttcattataaaatttgaatatggctttcaaattattcttattttccggatacgatctacacaggtgatatgccatccagacataacaccgtgcatcccgtatccgttctttcttttctaatccacattctattttcttactgatgttccaccctatattgtaataaaaattatacagataatttaatatgcccttttctctcaggaactcaatttctcttttacagattgctatactttcatcatattttcccgaaagacctaatatattagaatacccaacataaaccaaatatcgcggtttataatcattaaccatatcttctcttttaaaatactgatccaatctatgataaatcctcaatgcttttttacgatcgccataagcttcataatacgttgcaagattatacacgatcagtacttctgtctccctcaggatcctgtgaatgggtaaatcttccggttctctgatctttaatgtttcataaagcgcatctttcagctgttcaattgcttcctgtacgctgatccgtccttttttataatttacaatcactccaattctttttaaatactggcggttttccggataatccagggataattgaaattcctgttccatttttctcttctgattttctacttcatcccagtcagctctttccagcagattcatcatcttttccatttctttttgcagatccgccatttcgcaatgcaggggaaacagacaggtattcccgttttcacccatcttctgcatcagtcgaacaaatttttcatctgatggattcagcagtccattttcatatcgtgaaatcgttaccggttcacagattccctctgacagttcttcctgcgtcatgccagttgctttacgtgtatattttataacagccgccttgctgtactctcccataattctatcccctcttctgtaatacttccattcttttccgtttccagaattttcagcacagttataaactcatcctgttccagctctttttctttccccggaatcattttttctatatcccgaagtaattcgcatatttctctgagatgaaggctctgataactttccatcagcagttttctggcttctgtaagatgtctgtaggcttttcctgtattaagatccaatacttctttttgtgccagcctgtataaaatctgcggatagtatttttgtctcttcccataatcccagtaatttttatccagatactgcttgattcctgtatgtaaaagcaacgcctgttctgctttatcctgcacatacagtgtctctgccagtccatacaggcagctgatctcacactctgtcagaaacctgttttttaatttatctccgcttacaggcagctccgtatatccaagcgccttccgataaaattgttctgccctttggaaattttcctgtccgcaaaaaatctctgctttcttcatccacagatactgcatatgcaaactgtcattttccgtcacaaagctctcatattccctgatcagaaataaagccttttctctatcctttttttgaaatttctcaatctgatttctcatcatccgaaactgaaattcctgttcagagcctataaactcatatcgaaaaggaatctgacccatgcgttccaggagagcatctgccataaatttatccggaatccgctctcccagctcataccgcataagcgttcttgctgagcaaaggccaagacttaatttttccctggaaatctttctgttttctcttatagaacgaatcagatttcctactgttcttttctcttctgacattcttccttttcaccttccagctatacgtttctttcattatagcagaaaacaaaggtttatatgccaaaaagactcgaaatctgtaaataacataactttgatgtaatatagaattcccctgttaataatcttgatcgaaaatttattgaatcaataagacgctcttctatataagagctttgcagacccctggcgccgccaatggcgcaggggcagacttgttttccggcgatacagaatcatcgccgatctttcactctttatcttctgaattaaaatactcttctgctttttcttcaaatgtgtgcagagaatccgctcttgcagccagtttaagcaaaaccttcaaagtttcaaggttttcaagattccggatcttctcctgaatctcacagggaatttcgcctgattcctcaagcagttccaaaacagcttcctgcgttgcctcaagtcttccttcctctctgccttcctgtttttcctctcgcagcatttcttcaaagatcatatagcgctctcccatttcccggtcggtcttaattgatcgtcaggtcctgtaatgtttttcgtttcttcatccttcctccagttctacagaggaatcctatgagataattatatcatgcgccagctgaaagttctatgtttttttcattgacttctccctgtgttcctgccatactaaaagtaaatttttgcatcgtttccggaaaacaccagatattttatatttactatacaaggagcagcctatgtatctttctgatatgcatacccattctattgcaagcggtcacggaaccagctgtacgatttctgaaatggcaaaagccgcttccgcaaagggcctgaagcttctgggtattacggatcacggtccggccacactggcagccggaactccttcctacttccgcagcctgaccttttcccccaggaaacgctttggtctggaattgttttatggaattgaacttaatattcttgataaagaaggacacaccgatctggacgaagaacttctgtccaggttggattatgccattgccagtatccatgcccagaattacaaaaatgcttcctgtgaagaaaacacggaagcttacataaacgctatgaaaaatccccatgtaaagattctgggacactgcgataatccccgttttccggcagattatgaaaaactggcctttgaatccaaaaaacagagcgtgatttttgagatcaacgaagcctcgcttgcgccttacagctaccgcggcgatacacgggccaataaccgggaaattctccgttgctgccgaaaatatgatcttcctgttcttctttccagcgacagccatggcaaagaacatgtaggagattttacttatgccgctgattttgtacaccaggaaatatttcccgaaaatctgatcctgaacaatcagcttcccagactgaaagtgtttctgcagacccgttgctgaacagagcaatttccctgcagccatatcattctgccactaaaaccctgacatacagctgaaatctgtatcttcacagtttttcagcctgttagggtttcttttgattcttgttctgtttttgaacttctgcccctacataccggacaggttttcttcttttactcagaatcctttatttttttcatcatttctgccagctctgcatattttccggttacatatccataattttttctcttatgaggaagctgacaatttgtacaatccttaattcctttatccgtataacgaaaattacctccacatttatctccaagcgcataaagcggacaatagcagaacagacagttaaaattttccggatctgctccctgatggcaggggaaatactcacattctttattgctgaaaaatgaatagtgcttaccttcccaatatggtttttccatggtgttctccttttatttcctgtttcatttttacattttctatacaaggcttaccgactctgccgacgtttaacaatataactgtaaatgaacaaatttaaaaaagcacacagcagattctattgtctgaaattctatattttctctttcataaaatataatataaaataagcaggttaaaaacgcgcaacgtcataagggcagatacgtccgctttaaactccctgaatttccggtaaatgaaaaaatcggcgtcataaacgccgatatccaaattcttctgaggttgcgatctactccggggtagaccatggattcgttcaaaatatgcggagggaacgaacgcatccggagtagtatcgcctgccatttaatcatcaccctttaagggtaagtataattcatacgaacaggcggattccataaaaaatgcctgcttccatcaagcagacaacgcctgaaactgcggatttttcaggttggctgttacactttacacggaagtttaacctcgccatacaaagcaggtttcctggctccagaatcaatgttctctttccccttctcatacatatgtacaatggtttctgaaagattgctcctctgttacagtgaccggatcgctcaggactttcacctgattcccttttctgactgcttcgcggaaaacagccagcacttcatatgttcaatatggaattatactgatgttatcttaccacatctttatataaatgtcaaggaattccaaacaaaattcctccactttttaaattttagctactgttcacacagaactatttagcgaggtattttgacgtattttacagacttacaggcatgtacagaaatgaaaaagctgtgtattcaaaaatggataaacaactacggattcctcttaatgatttagttccgtacgaaaaactgtaaatattattaacttttcgtcactgggtacagaaagaaatcagaatagcgccttttacacttctcttactttttcctgcggctgaaatcataatccttgtattatggctgtaaaatcaaaggttccccataatcttatccttgataacagccagaatctccctgggaatatagatcagaagtctccaggaacgatatctggatggaattccacagatatctctgcatccgcatttctttccgatcgccactccccgaaatacatggaagttattggtaacaactcctactgatttattcagatcccctattttttccaggctgaaatccagattttcttttgtattggtagatctttcctccaggatcagccgctctctgctgattccatgaccggtcagataatcgtacatggcctttgcctcactgactgcttcccccctgccctgtccgccggagagaactgctttggtgtcaggattattttccagatactgcaaagcccttctggtgcgttccagaagggccatactcagtcgtgttccgtccacatgggcgccaagcacgataatgtaatcaagattattttttattttcattatttgccgcagcagaatttgtatttctttccgcttccgcacggacagggatcgttgcgtccgatcttgtgcggttttacaacagtaccggattttttctgctctttgtacagctctttacgtttttcctctgtaaaaatattattccactgaggaagctcatacagccagtcagcctttgcgtcaaccatgtttttgtaaagaagctctttgtcaaaagcaaggtttacttttgtgttctcgtccattgtctcaatagggttcggaaccttaaggctgtcgttaatgccgtccaggaaaccaaccatggtcagaacatcctgtccgtatttttcggcaagctcttttactgtaccgcttacaacttcatccggattggaaagaagctgctcataaatgcctttttcaatattaaaataagctgcccagaactgctgaagcttattgcggtctgcctgctggtcataagccattgcacgccactgctctaaaattgttttatcactcatgttatttcatcctcttttcaatgtattatcaaattttcatcagtgttcatattatagcacttttatcccaaaaaaacaaaccctattttatcccggttcccattggtttaaacaaaaatcccactgtttccttcgttcacagcaggctggtcagcatacccttcaaaccatctcaggcaatcatactttatccctgttactctcacggaaaaaatataattatccaattttatgcttcatgtataagacactgagatcatggccatactgttactgttcacttcatccacggcaacaggcaaaaattcattccacattgcctgtggcaatggaacagtgaacggacacacccgaaaacatttgctgctgtaaacagagtatacagcagcagcttcggaaatacttatatcctcccctttaaaggttccgggactgacgttctgacgcggttccgggattttttattttactcccagagcctccaggtctgctgcagcctgtttaaagtcatggaaacgcactgcatgcattcccagtttacgtgctccccggcagttttcttcccggtcgtcaataaatacacactcctcaggcttcaggtcgtaatcctccagaaggatcttgtaaattgccggttccggcttcacttcttttacatcacaggaaaatactgttccgtccatatacttcaggaaattcatttttgtctttgtacgttccagcatatattcgctgtaattggaaagaacataaagatgatagccccgttttttcaggtactgtacccaagtctgagcatagtcctttgtaccgatcgtcttaggtgtttctctcagaactctgcggatatcttttttgtattcaggagccttttctataaaccggcgaatatattcttcctcatcataaagccccttatctctctcattccagatatcgctctggaaaatttcctttgcaagctttttctcctcttcctccgggaaatgaaagcccttcaggtaagttttccagtcgtagtctaccagcacattgcccacgtcaaaaataacatttttgatcctgcgcccatctttttccagtctttttctgttaagaagcctgtacataagccacattgcataagccatcactgctgcaaacagcgcccctgcaagagaggccataaattttcccattgaaaatgttccggtaagagcaaagtacatgggaaggcagaagatcaccagaagaaaaactgctcctgcaagggccagtccccttttccatttactcatttatactgtacacatcctttctgctgtcagcggcgtcttcatatctgtccgctgtatttttatttaccggaaatatcagtacaaaaagtacggatttcccggtaataaaacgccggagatacttccccggcgttttgttgatttattttctgtaaataatatcgtttcttcccggtccgttagaaaccattgtgattgggaatccgatctgtttttccacaaactctatatatttgcggcagttttccggcagatcttcatattttctgattccgcggatatcgcatttccatcccggaagcacttccagaaccggttttgctttttccagaagtcctgttgtggggaattctgttgtaacttttccgtcaatctcatagcctgtacaaacaggaatttcatccagatatcccagaacatcaagcacagtaaatgcaacatcagttgttccctgcatacggcagccgtatttggaagccacgcagtcaaaccatcccatacgtctcggacgtccggtggtcgcaccatattctccgccgtctccgcctcttcttctgagctcgtcagcttcttcgccaaagatttcagaaacaaaggcgcccgctcctactgcgctggaatatgccttgcatacagtaatgatcttcttgatctcatacggcggaacgcctgcgccgatggcgccgtaagctgccagagtagaagaagaagtaaccatcggataaattccgtgatccggatccttcagagaccccagctgaccctccagaagaatttcttttccttctttcagcgcattccacaggaacagagaaacatctcccacataaggagctaccatctctttatatttcatcagctcttccatgatctcatccggattcagaagcggtttgtgatacagatgctcaagaagaacattttttgtctcacatacacgttctactttttctctgagagcttcctcatcaaacagttccgctacctggaagccgatttttgcatatttatcagaataaaaaggcgcaataccggattttgtggatccaaaggacttaccgcccagacgctcctcttcatactggtcaaacagaatatgatacggcattacgatctgcgctctgtcagagatcataatcttcggagccggaactcctctgtccacaacctcctgatattccttgaaaaacaccggaatattcagtgccacgccattgccgataatactggtggtgtgatcataaaatacacctgacggaagtgtgtgaagcgcaaatttaccataatcattcacgattgtatgacctgcgttggcacctccctgaaatcttacgataatatccgcttcctgggcaagcatgtcagtgatcttaccttttccctcatctccccagtttgctccaactactgctttgatcataacactatttcctcctcgtgtcgttctttgatctcattatacattaatttctgcggttactcccagaagttctttatgtgcgtccagaacaggctgtacggtctttgcaagaaatacctctgtctgctcttttgctcttcctacatatctggaaggctccattgtcttttccagttcttctaaagtcaggttaaaggccggatctgctgcgatcagttccagaagattgttatcctttccttctacctttacagtacgtcctgcttccatggaaagctctctgatgcgctcgtgaagttcctgacggtctccgcctgccttcactgcatccatcataatattttcagttgccataaacggaagctcagaacgaaggcgtttttcaattaccttcggataaacaaccagtccgtctaccacgttcaggcacagatccaggattccgtcaatggcaaggaagccttccggaacactcagtctcttgtttgcagaatcatccagagttctctcgaaccactgagttgctgatgtgattgccggattcagggcgtccaccatcacatatctggaaagtgacgcaatacgctcacttctcataggatttctcttgtatgccattgcagaagaaccgatctgagacttctcaaaaggttcctctacttccttcagatgctgaagaagtctgatatcattggacatcttatgggcgcttgcggcaattccggcaagaatattgagaactctcgtatccaccttacgggaataggtctgtccggataccggatagcagttctcaaatcccattttttctgcgatcatcggatcgatcttgtcaattgtttcctgatctccgtcaaaaagctcaaggaaacttgcctgggttcctgttgttccctttgagcccagaagcttcagtgtgcttaaaacatactcaaggtcttccagatccataaggaattcctgagtccaaagtgtggcacgttttcctactgttgtaggctgtgccggctggaaatgtgtaaacgccagagttggctgatctttatatttatctgcaaatttagacagctctgcgatcacattgaccagtttcttgcgaaccagcttcagagcctctgccataacgataatatctgtattgtcacctacataacaggaagtagcgcccagatgaatgattccctttgctttcgggcactgtacaccatatgcataaacatgggacataacgtcatggcggacctgacgttctctttcttttgccacatcatagttaatatcgtctgcgtgagccttcagctcatcgatctgctcctgcgtaatattcaggccaagttctttttctgtctctgcaagggcgatccataatcttctccatgtgcggaatttcatatccggtgagaaaatatactgcatttctttgcttgcatagcgctctgaaagcggacttacatatctgtctgtactcattccgtttctcctatcatttgaaaaattcctgccgtgatctgccggtgccagacagaaccacagtctctgtttctgccttttcctgacagtcatatcatacgaggaaaattatataacatcccacatttaaaagcaacctcttttctcaggctccctggtggaagttactgtcaagtaatcgttggcaactttctttttgatttatctttttgttgaaatagcatgttttgtcccagtttaatatccagccatgtacaacagtcgttttctctccccctgtatctttccatttaatctaaccatatgtccaatcaccggatattcatatccttttccgtctttctttggcgctttcgctgacatcagaatctctccatacaattcttctactttttcttcttcaaataccggtcgacgcagacgttcggtcacttcatacagttttccactgcacttttttgccaggatcttcgccagatgatttcctccccgtttactccagcttctatgtccatgcttcattcgctttgcgatcacgctccatacatggttttccatcgttcccatattccgatatgccaacccttccggtggctccggaagattgagattttgagactggtaaggcacgagtccttcccggttgttctcgtaataacgaatcaggtcctctacatcttcaatctcggactcatcacttaagctgtttcgatagatttccagataccggaatacttcttcaatctcttcggcttttatcagttctaaaacagcctccctcgcagcctgttcatggattttctcttttacagccttattccggtggaacgggtctaactgaaaacaggtgcttttatctttcactttcttgatccaggatgctccgtctgcgtttaagattctttgacccacttcatctaggttaaactcctgcgcgattgctgcttcccgatattcctgaaactcctttgctttggaaaatccggcaacgactactttattttccagcgcataacgatccgaaccggtttttcgccatccttcatacgcaatccctatcttaatctctgatttatcctgtttttcttctttccggtcttttccctgcagcctgatataaactccatccgcttcttcaaacaagacgggaacttctctttttccttttacatgccctttcttatattcttctgtcagctcagcttcatcctcacagactttttcccctaacgcttgaatgacgttccatacgcccatcgcactgatggtctgtccagtcatctcactgacctgacgggcacattctctgtaagatagttctgtaatcccttttaccaacagttccgccatattcgttgagatcaaacccacgtgatccagatccagtgtttcgtccagcagatatacaaaacgctttcttccgtcctcctcattcacttcataaacatttctctgataagtcacctcaccatatacggtctttacggttgtctgtctgcctcctttattccggtacttctttttgtctctgtcctccagcagcatccggtcataccgttccaggaactcttttgtgaactccctgccaatctggcagacccacgcataaatatttttctccaactgcttgaatgttacaccgttttcctttatcattgaattcatcatacagactccttatgttttttctcgtcaattaaacaataagataaatctgtatgattgggaagaggtttcgatctcttccctttatttttgccaatgataattatactctaagctggtggaatttgcccagaaattcgcgcatacgggcattctcagaggaaaatacctgctgaggagttccttctacagcaattactccctgatccataaagatcaccctgtctgaaatatcctttgcaaaattcatttcatgggtgacgatcaccatggtgatatgaagatctgcaagtgaacggatcacccgaagcacttctccggtaagctcaggatcaagagctgaggttggttcgtcaaaaaacagaattttagggttcagcgcaagagcccgggcaatagccacacgctgacactgacctccggaaagctgacagggataggcgttttctttgtcagaaagtcccatctttgcaagaagctccctggcttccctgtaaacttcctctttttttcttttctgaacatggatcggcgcatctgtgatattttttattacagaatagtggggaaacagattaaaattctgaaacaccagcccaaaacaggaacgtatttcttttaactgttttccggaaggaaccactgtctttccgttttccatccacacggatctttttcccatataggaaatttctccgctgtcaatgtctgtcagcatggtagcgcaccttaaaagagttgatttcccggaaccggaaggaccgataatggaaacaatctctccttcttttacctgaagggaaatatctttcagaacactttgtccgttaaattctttttttatatttttcatttccagaagattcatttccgtctcctcctaatgatagtaattcagttttttctcaaaccattccataccccaggcaactacaaaattaaatatgtagtagaacacgcctgcaataaagaacggcataacggttgtctccgcagcggcgatctgttttgccagagcaaacatctcaatataagataccgaatagacaagggaagtatcttttaccagtgtgatcacctcgttcgttacagaaggaagtacgttttttatcatctgtggcagaatgatcttcataaatgtctgctgtctgttgtagcccagaagctgcgcagcctcatactgtcccgccggaatggactctattccggatcggtagatctcagcaaaataagctgcatagttcaaagaacagcccaggataatcgctgtaaatttataatttccaatattcattccccagagataaaagggtccgaaataccacagaagaagctgcagcataagcggcgttcctctcataacagaaatataacattttaccaccagactgaggggtttgaacctggaaaccctcccaaaatatatcaccagtcccagaggcagggaaaacagaagggtcagacagaagatcataagcgttgacccgaagcctctgaaaagctgttggagcattacctgaaaactcatattttttcctccgttatcaggcagaaaagcttttcctgccgtaataaagctgctgtacattttttattttcagcacagcagcttttttgtcttttattccgggttctgacttctgcccggttctgattttatccgttactgtttccggcagcttttattctgccgcttcttcagaatcagtttctcctgtttctttttctgcagcctcctcgctttcctctccggaggctttcagacttaccatatccgcaatttcatacttctctgcaagctcctgcactgtcccgtcttccgcaagcttctgaagatctgcatttacaatttcacagagttcgtcgtttccttttttgaatccaattgcatactgctccgtattcagactttcatccaggatcataaagccctcccccctggaattgatctgatattttgcaacgccgatatcaatagccagcgcatcaagggctcctgcctgaagttctgtaaatgcagtgttgtaatccgcaaattcattcagcgctgcaaaggtatctgacagcgccttctggccgccttcttcctcgcttttcagtacgtccagcgctgcagatgccgcctgaacgcctacggttttgcctgcaaggtcagaaagcttctcaatgccggaatcctctgccacaacgatcacctggctgttatccacatagggaacagaaaaggtatactcgtcttctcttccgttcatggtaaaaccattccagatacagtcaatggatccggagttcagctccatgtccttggagtcccagttcagaggtttcttctcaagctcccatccttccagctcacacactgcctgggcaagctccagatcaaagcctgtatactctccgttttcatccatatatccataaggaggatattccgcatcaaaacctacgatcagtgttttatcctcaattccagcctgaacgtttaccgcagacatcatacctgctgccatcagagccgccatcattaccacaactgtttttttcttcatactgtctgtctcctctcgctttactcttctatgttatcacgtagtcactctaccatatgaaagtattgatatcgtaacatacctgtacccgcctgtcaagacagtttttatatatttacagacagtaaaaaagccagcgggataagctggcttttttggagaaggtatttcttcttatggggtgtagcaaaaactatataatgtattggggggtttttacgatatatataataccatgggtcaacaaataagtgtgcacaaagttcacaaaaatgcatatttgtttttggatatattgtacatgcgtattttgccactatgattttacgctgtaaaaagtgcctcaaactcgtctctctgcaccttttccttctctaacagaagagctgcgcatttatggagcacatcttcatgctcaagaataatctccctggctttcttatgacatccgtcaatgatcccatggatctcctgatcaatatcttttgcaacctcttcactgtagcttctcgtatgagcaagatctcttccgataaatacttcatccccttcatcaccgtaagcgatcagtcccattttttcagacatgccatactgcatgaccattgcccgggctgttgtggttgcacgcttaatatcattggatgctcctgtggtgatatctccgaaaataatctcttctgccacacggcctccaaggagagtagtgatatcctgaagcatttttccttttgtattaaacatctcgtcattttccggaagaggcatggtataacctgcagcgcctactcctgtgggaataatggaaatcgtatataccggatccatatcagggagcacatggaacaggatcgcatggcctgcctcatgataagcagtgatctttttctctttttcggaaataaccttgcttctcttctctgctccgatgccaactttaataaaggcatgcttgatgtcctgctgcataatatagctgcggctgtctctggcagccatgatcgccgcctcgttcaggaggttttccagatctgcacctgtaaatcctgctgttgtctgagcaatctgcgccagatccacatcctcgccaagaggcttatcctttgcatgaacccgaaggatctcctcgcggcccttcacatccggacgtccaactgcaaccttgcggtcaaaacgtcccggacggagaatcgccggatccagaatatccacacggttcgtggcagccattacaataattccttcgttgacgccaaatccgtccatttccacaagaagctggttcagagtctgctcgcgctcatcatgaccgccgcccatgccggttccccgctgtcttgcgaccgcatcgatctcgtctataaaaataatacagggcgcatggcgttttccttcttcaaacagatctcggacacgggaagctcccacacctacgaacatctccacaaaatctgatccggaaatagagaaaaagggcactcctgcttctccggcaaccgcttttgccaggagagttttaccggttcccggaggtcctacaagaataacacccttgggaatccttgcgcctacgtttgtatatttctgaggcgcttttaaaaaatctacaacctcaaccagatcttctttttcttcctgaagtccggctacattctgaaatgttacttttttgtcgtccggaagcatcattcttgcacggcttttaccaaagttcatcattttggcatttcctccgcctcctgacatctgtctgttcatcatcaggaaaaggaacagaatcagtcctcctgtaagaagcagaggaagaagtgtggtaaggaacacattctgctgaggaacatctttgaccagaggagcaatattgttttcctccagcatttcctgcgcctccttgacatctgttacatagacacgcttctgtccttcgttctcaatatctgcagccaccgaaccggtaggtacttccctgttctgataaatcaccgcatcatttactcttccttcttctgctgcctgctccaatgcttctatggtatagtcattctgacctgacacctggctgttcagataaaaatatccgcccaccagcaatgcgatcaaaatcagatacaggccaattctgcttggctgtttattcacttaactgaatctcctttcattcttctgtgtccagttctaccacgccgataaacgggagattacgatatttctgggcatagtccagaccatatcccacaacaaattcatccgggatattgaagcagcagtaatctacttttacatccctcactcgtctctccggtttgtccagcagtgtacagaggcggacactgtttggattacgtcctttgaggatttcgatcagatagctgagagttcttcctgagtcgatgatatcctccacgatcagcacgtccttgccgatcagaggctgatccagatctttgacgattcttaccacaccgcttgattttgtgtcatctccatagctggacacagacataaagtcaagagataccggaacagtgatcctttttgcaagttcacaggtaaaaaatactccaccctttaaaacacagatcagatgaatctcttttcctgcataatctttgctgatctttgcggcaatctgtctgattcttgcctccacttcttcctcgctgagtaatactctgattttttcactcatgatattttcctccttggtatttgatttccagcacattctttgtctctgatgtgatcttatacctttcattcattcttccgcccacgatccagagaacctggctgccttctgtgatcagaggaatcttatccctctgttcacgggggattttttcatcgatcatacaccgcgtcagttttttgcgatgcccctgactgtttacagtaaggtaatctcctgtttttctggtacggacagatatatcgtattttattctatcataatccagccatttcgtatactttttttcacaaatcttctggtctgaccaggaaaagatttttgtttcaaaatttcccagactacaggcaaggcttccgtttaaaggaagctgatattcccgggattccctgtccggatcttcaggatttttcttccttatgataattccttcatatgttttcgctgcctccagattatatggaagctttactgacgctccggtacgaagttcaaaaagctccagcactgcacgcacatgtatcagagaaatatcctttcttttgcctgcaagcttttcaacagcatttctcaccgcatacttccggataatttcaggatatttcaggaaacttttttcaaaaaggatctctcccttttcggttcggcatttttctgccagtgaagcgcctttttcctgaaagtaagcctccgcctgtccaatcagctcagatgtctctgccatatgagccactgtcttttcattgattttactttccagaacaggaagtacatggtgccggatcctgtttctggtatattcgtcctgaagatttgtgctgtctgttacatagggcagatttctttctctgagatattcattaatttccttccgttccagacagagaaccggacgaatgatcccatcctctgccgctttcatggaagaaagtcccctgagaccggttcctctgcagagatgatgaagcatagtctctgccagatcgtttctgttgtgcgcaagagcgattaccttctttttttcccctgaaaccggtactccggcaagcgcttcttcaaaagcctgcctccggactgttcttcctgcttcctccagcccggttttccactgtgcggcaagctttggaacatcaaaacagtatactctgcagggaattcccatttttctgcacagtttctctgcagcctcctgatctctttgcgcctctgcgccccggatcccgtgatttacatgaacggctgtgatctgaaatccgtattcttctttcagtctgttcagaatatccagcatggtcacggaatcgcctccgccggatactccggcagccaccgcgccgcactgatcgaacatcctgtttttttctgcaaaagcacgaacctttgcataaatctgctcctgcatgtctgcttttctcctcttttgtttctacttgcgcagcacactggccaccagcacagtcatatcgtctctggcccggtaatcgctgtatcccagcacccgttccagaatccctctgctgacctctctgggattttcctcctgcacgtccataatgatttccttcatggtttcctcttctctgtccagaggaagagcatccagaactccatccgtcatcatgatcaggtaatctccatgataaagtttccgggaagcggtatcaaaatcaatctgctgaaccagtcctgctgcaagactttccgaagaaattacctctacccagtgatcccgtttaataaaggtagatgcagctcccgccttcaggaaactgcagattcccgtataaagatccaaagcacagatatccactgtggaaaacattccctcccgtcccttcagcaccagagcagaatttaccattctggcagctgtttcctgggtaaaaccagattccagaaactgctccagaagctccaccacgatctcactttctctgcaggcgtccatgccggaacccattccatcagaaagacacatcacaaactttccgccttcttcctgtctgcagatatagttgtccccggaaatcttttcttcctctcttgtaagctttgccactccgtacatcacctgatagctgacgtcttccacaaaatgtaccgtatggtattcgccgtttacaatgcctctgctgtcagcggcagaggtcatagcgcactcgcacagacctgaaaggagctgagaaacctctgtcacagatacacactggccgcttctggctttcatagtaaggaacatctgcctgtgcccctctaccttatccataacccaggcatttttcagcacaatatgacgttttttcagaatccggcgaatactctcctgaaacttcgggtctgccggagaaatatcataaatatcttctgccaccattcccatgatccgggatatctctgtcagctgctgtgccactgccagcctgctttcgatcatgcggttgctccataccagattctgtttttccttctgaaaacgctctctgactgtttccagatactgtatggatttgccgcagatctccgcccactcctgacggatcatttctacagcctcctcatccccctcttccatggcgcggatcattgcctctccgccctgcttcagagaaccggaattttctccccagcatatttctctgtgatagcatctgctgcacatttcctcattggtatccttcaatatcgcgtcaatctgaccggagcttaaatattctttccggtagggcatcccgtaaaaggtatctgccagcttctggaaagaagccgcataccgctccaccttctccttctgaggatggctttctccgggagcaaagggttcctcctttttcgacatttgccccgtcaaaatagtttttgccatgtcccggaaaatcagcagtaggctgatcacgagcatggcaataatccattcctgcatatttcccctcccctttacacacttcatcaagtgccattataaaggacaggttccaaaatatctgtcaaacacaggcgaaagcaattaaaaacttttcgccaaaatccgtgttatttttcttcttcaaacactatctcattatcttttacaagccccagtctgtctctggcaacctctgccgcatactcatctgtctgcatatactctgtgcgcttgtcaatttcctttgtccgctctttttcatcagaaatctgctgtttcagctctgctgcctgggcgtcataataggtaatcctgtttctgaggctgtgacttttcattgccaggccgccaagaagcagaagaacaacaactgaaataacagccattcccagatagttattcgttattctttttttgcttttctttctttttgactttttcaacctgactgatcctctttgttttaaaaccttttcttttttgcatagtttgatacttatacaataaaatactacatcttttaaagagaaatagcaacctctttgttgaaaattttacaaaattcaccggaatcccgcacagaaacacaagaatccgctcaaacagatctgccaccgtcccccggcacagaacagctcccagaatacttcctgcaaaaagaaaacatctgagggttccctgattgaacctgtatatcacagaaaacataaaaatccctgctgcagtccagtaaaaaaggtcttccacatccactgcccaggacggatgggaaatcacttttctcagggcagtcagaatcttataaaagagaaacagagccgcccccatcaccacagacagaagaaacagtactgcctcatactccatataaccgctcatattttaccggaacatccgcttcagcagagattcttctttgttttctgtcttttttgaaagataggttaagctgtttatttttccttcaatatcggcctctcccttttccagattcagtctccgcacatggagcagttctccttttacagaaagtcttccggcctctgtttccagcaaaatctcgctttcattaaaggaatgaatgtcccggacgcctgtaaccgtgccctcctgtcggttatcaagggacagtctgtgggcgcacattgtttttttctcttccaagggtcagcctcccattgtttctttccataaacaatgtatgaaacagcccttataaatagacgtaaaaactacagatagcggaacatactttccgcctcttccttgcggactgtctcttttacatcaagaacttccaccttaacgctttttccgccaaactggatctccacaatgtctccggcctttactgccgcagaagctctggcaggtttatcattaagcaaaactcttcccgcatcacaggcttcgtttgccactgttcttcttttaataagacgggaaaccttcagatatttatcaagacgcatacaaaatctcctgttctttttttctgtattctatagaaaaagggggaacacgctgttccccctctgctgaactttattatttatcgtttacaagatcctttaaagccttaccagctttgaatttcggtgctttggaagcttcgattttcatggtttcaccagtatgaggatttcttccttctcttgcagctctctcgcttacctcaaaggtaccaaatcctacaagctgaatttttccgccttttttgagctcggatgctacaacatcggtgaaagatttcaggactgcttctacatctttcctggaaagatttgtctctttcgccattgctgctactaattctgttttattcatggtgtttcctcctataaatgctctctttctttattatcgcgttatgcttcctgtcgatcacacgctatttactatttatataccttttcctgtagattgtcaaggttttttgtggcaaatccccgtaaaccggggctttcaggttactgtgaacggagtaaaaagcaacgcttccggctaatgcttctgaaatacttttcagagctttttcgtcttcctgctcttttcgatttctttcagctgatcccaggaaagagaggtcattgtctcatcctccggaacaaagattttcggatgacgaaactgcatttttgaagaaataccatcgatcacatcctcaatagtaaacagcccctcttcctgggcgatcacactgtggagagcaacctgaaacagcacgtctcccagctcctcacagagattttcactgtcattctgtgttttcagacgatcaattccctccagaagctcatttgtctcactgatcagataaggtttcagactttcatgagtctgcaccttatcccagggacagcttttgcggatttttcgcaccacttccataaattcatcaaaattctgcatcttctcaccgcattacatcattgtattgaccatatcaagaacagccttgcccatgactgcagacttttcatctgcatcctcaagggaagttccttttactccatagtagaattttacttttggttctgtaccggacgggcggacacatacccatgcatcatctgtcaggtcatagtacagaacattggaattcggaagtccggtaggcttcacctctccggttgccagatctgtaatggtatcctttttataatctcttgcagaaactaccttatgtcctgcaaactctgccggaggattctttcgaagagtatccatgatctcctggatcttctgaagtccctcaattcctttcagagtaatggatttgatatcatccttataatatccgtactggtcatacatctcgatcattgcatcccagagagtttttccctgagtcttatagtaagcggcagcctcgcacagcgccattgtagccacaatcgcatccttatctcttgcgtatgtaccgatcaggcagccatagctctcttcaaagccgaaaagataagttccctttccgctgttctcaaagcccagaatctgctgaccgataaacttaaatcctgtcagaacctcaatgagatcaacgccatagccttttgcaatggcatctgccagattgctggtaacaattgtcttgatcagagcgccgtcctccggaagacttccgtttactgctctgcgctgtccgatctcatagtttgcaagaagacagccggacatatttcctgtcaggtcatggtattcgccgtttttatcttttacgcgcacacccagacggtctgcatccggatccgtggcaagaacaagatccgcatccacttcttttgcaagcttcaggccaagttcaaaggcttcggctgcttcaggattcggatagcttactgtagggaacgcgccgtccggaagctcctgctccttaacaacatatacgttttcaaagcccagctccttcaggatccttcttgcaggaatatttccggttccgtgaagaggtgtataaacgatcttcagttttttgccctctgcctcaatggcatcctgatggatcacctgttttttcagctcttccatataggcatcgtcaatcttctggccgatcacttcataaaggcctgctttttctgcctgggccttgtccatggtttttacagtattccagtcggagatcgcctttacctctcccatgattccggtatcatgaggcggagtgatctgagcgccgtcctcccagtataccttgtatccattgtattccggcgggttatggctggcagtgatattaattcccgcaacacagccaaggtgacggactgcaaaagagagctccggtgtaggtcttaaagactcaaaaatatatgccttaattccgtttgcagcaagacagagagctgcttcctgggcaaactccggtgacatatggcgggaatcataggcaattgcaacaccctgggactgtttgcccacttttgcaatataatttgcaagcccctgggttgctcttcttactacataaatattcatacggtttgtacctgcaccgatgattccgcgcaggcccgccgtaccaaattccagatccatataaaaacgttctttgatttcattctcttcttctgcgatgttcttcagttcctcttttgttgcatcatcgaagtatgggttcgcaagccactgctcatatacttctctgtaatccataccgctgtacctccctatatcttttttaaactgcgctctgcgaagtttatgatttctaattatacacctgttttctgaaaaagggaagtctgaacagtttctccttcataaaatttcaggctccggtgacccccaaatctaaaattccctggaaacatgctgtgtaaacagtatataaagttccttctgtctgtattttaaaaattgtattctttaaaacattgttctccgaaagcttcccatttttctttctgtctgatcagcgcctgaagcttttccgtatttttttcagaaatccatgctttgttgtgggtataatagtagttggacaatttccagaatttttccggataagtaaaccggatcttcaggttttcccactcttctgcggaaatcgggcggattctgtggtatgtttttagcatttcttctgctaaatttatattccagcctgatttttccagtatttttctcataaagtggtaaagatctccgatctggattccaaaacaccagtgtgagaaccctgttactgccgtctttgatttcagtatcagaacgttatgctgattgtattccccgtggcagactgtgccttcttcttttgccttttcccgaaggtctacataggaagacgccctgagcatatttacagccagctctcctctcgccagaaaccattccacagattttaaatattccttttcaaaagcacacgcaggacctttttttctgataaatctgcgaattttcctcagttcctgattatggcgctgatactcgtcattcagattttcttccatataagaaaggtctgtcggaagtttcatttctttatggatcccggcaagcgtccccactgcctgcagaatctgttctctggatctcgtatcacattcccgcccttcataccagcgctgaagagtataggaaattccatcccggtcagttgaaataagctctccttctttattttccagaaaggtatctaccagacaaccattttcctccagctttaaaagaagctcctgctgcttctgaagtttttttcccgagcctctctgttcacgtaatactgccggacttctgtcagtctgacagagaagtcctcctctggtacgggctgtactttttacagtcagctcgtactgttccagaacgctgaatccataatcatacaaatctgcttccccctcattttttgtactttctatacttatgtacagaggagcggaaattatgcgtagctgttcacacggtactgtcccgccaggtattttgtcatgttctttgatttctgatcctatttgtagaaaaaatccctccacagaaaatttctgtgaagggacctctcctatacgtttcatgctttctgaaattttaatcctgattttctttcaccagctgcatcagcgtttccttctgattgtcttccggatattctaggacatgctccagaagctgatccagaatttctcccagataagggcccggcttataaccggcctgaataagatctctgcctgtaactgccagacttttcagggaaacacactgttttttctccacgatctgctcataacaggatttcacaccttccagccgctcttccttttcccagcgctgataagtgctttgcgccagcatatctgctctctggacctccagataaagtggaaaaatatcttccccgattttgttgacagagcgtcgtacatttggcatctgggctgccggtctggcgtcatgccactttacaagccgacaaaccttatggatggtgtcattatcaaatttcagccggcgcagaatggattttgccatctgctcactttccggtccgtgcattttaaaatgatcgcggccattttcgtccgttatttttaccaccggcttaccaatgtcatgaagaagcatggtcaggcgaagaaccttgtccgctctgacgtgcaaaagacttttcagaatatgttcgcctactgtataacagtgatggggagtattctgatcagttttcatgcacacatcaaactccggcaaaaactctgctgtcacccctgtttcatatgcaacgcggaggtagtccggattgggggaaacaagaagctttacaagctccacctggattctctcggcgctgaccagtttaagattgggagccagagcgccgatggcttcctttgtactcgcttctatggtaaatcccagctgggcggaaaagcggacagctctcagaatcctcagcgcatcctcctgaaaccgctccatgggatcacccacgcagcggatcacctttttttccatgtcattcactccgccaaaaagatctacaagtcccctctcaggatgatatgccatggcattaatggtaaaatctctccgtttcagatcctctttaagatttgaggtaaaccttacttctttgggatgacggccatcctcatagtcgccgtccacccggtaagtagttacctcaaagccttctttttctatgagaacagttactgttccatgctgaagtccggtatctacagttcttctgaaaagcgcttttacctgctccggagatgcagatgtggtaatatcccagtcatccggacagcgtcccagaatggaatcccggacacagccgcccactacataggcctcatatccgttctgttccagcgtattcagaataatttccgcaccggaaggtatattcagcttcatcttagtatgctcttccccagtaaaccatttttttcgcaggttttccgcagcatacgcacacatcgcttaaatgctcctgctcaaacggcatacatctggaagttgcctgtacgtcttccttgatcttgtcctcgcaggcctgatcgccgcaccacattgcttttacaaagcccggtttcgtgttgatagtctctttaaactcttcatagtccgttgcaacataggtatgagcttcccggtgagcacgggctctttccagcatatccttctgcatggtgtcaagaacttcctgaacctttcctgccagctcctcaaaagttaccacatatttttcccgtgtatcacggcggcagatcacagcctgtccgttttcgatatccttgggaccgcactcaatacgaaccggaataccgcgcatttcctgctcggagaatttatatcccggacttctgtctgtatcgtccaccttcacgcggattcctgcagctttcagagtctcaaacagctcatctgctttttccagaacgccctctttgcgctgctggatcggaatgatcacagcctgtaccggcgcgattctcggaggaagcacaagaccgctgttgtcaccgtgaaccataatgatggctccgatcatacgggttgtcattccccaggatgtctgatgaacatactgaagcttgttttctttgtctgtatactgaataccgaaggcttttgcaaagccgtcgccgaagttatggctggttccggactgcagagcctttccatcgtgcatcagagactcgattgtataagtcgcctctgcgcctgcaaatttttctttatctgttttctggccttttacaaccgggattgcaagaacttcctcacagaagtctgcatatacattcagcatctgaatggttctctcttccgcctcttcagctgttgcatgagcagtatggccctcctgccacagaaattctctggaacgcaggaacggacgggtcgttttttcccagcggactacagaacaccactgattgtaaacctttggaagatctctgtgggactggatctccttctgataaaaatcgcagaacagagtctcagaagtcggacgcacacagagacgctcctgaagaggatccaggccgccgtgagttacccatgcaacctccggcgcaaagccctctacgtgatccttttctttctgaagaagagactccggaataaacataggcatgtaaacattctgaacgcctgtttctttgaatcttctgtccagctcattctggatgttttcccagatggcatagccggccggcttgatcaccatgcagccctttacgcttgtgtaatcgcaaagctctgccttttttactacgtcagtataccactgcgcaaaatcttcctccatggaagtgatggcttctactaattttttctcttttgccatgatcattctccttttttcaatactgttatttcctgtttccgggactgggaaggacagaatgcactactttcccggtaaataaaaaagcccttccaatccctgcaaagggaccgaaggacttcggcggtaccaccctgattagcagtacctccttaaacagctgccccgcggacagtctgtatttatactgctctctcctgtttctttaacgcagaaatacgccgtacttcaattgcacggagctctgaggccggttccacggttcgcgcacaaaatcctcacaccaccgcctgacagctgaacaggcttcgggatttctctctgagattgctctgcgtgtactattctcttcttcgccgttttctgttttcagttgtgtttccacgaacttttactcattgtatgcgaaaaaatctcctgtgtcaagcctcctgaacggaaaacccggaacaaatcccgcacttttatggctgccccgtaaaaatctgacagaattttctgcgcagacagcatttttaccttttcagacagtaatcctgatctctcttccggtacggttgtatttatagtatctgacgccggctgcatccagcatacgcttggacgcgatcacggacggagtattttcatatttgtcacagtcatatacaatggttttgatcccggactgaataatggccttggcgcactcattacagggaaaaagtgaaacgtaaagcttcgcgccctccaggcttccgcctctgtaattcaggattgcgttcagctcactgtgagtcacataaagatactttgtgtccagggcatcgccctctcttgcccacggaaacttatcatccgagcatcccataggaaatccgttgtatcccatggaaagaatcttgttgtcctcacttacaatacaggctcccacctgtgaatgaggatccttggaccgcatcccggaaagcattgccacccccataaaatactcatcccaggaaatatagtccattcttttttctttctccattgtaaaaccctccccataatactttataaactgcctgttgtctgagatcaacaggctttttgattcagataaacaggccaaaccctttacagctcgtcctgtcccctttatcttctttatatcagtctgtctctatctggctgattctgcgaatatgtctttcgtcattggaaaacggtgtgtttaagaaagtatccacgatcttaagcgcaagacctgcgcctacaactcttcctcccattgccagaacattggcatcattgtgaagtcttgttgcctctgcgctgaagcagtctgtacaaagtgctgcgcggattcccttaaatttatttgctgtaatggaaattccaatacctgttccgcagatcaggattcccttttcacattcaccattctgtatcgctcttgccactttttttgcataaaccggataatcaacagcctcctgactgtcgcatccatagtcaatatactctatattctgctgatccagatgctttttaatctcctgtttcagttcaaatccaccgtggtcacatcctaatgctatcattcctgttcctcctgtacgtttataatcttgtgtcctgcagcttttaaaagcctgttcataatcgcctgtcccattctgggcgtataaaatgcctctgagtaaatagcgctgacgccatccccgtcaaaatcccgaagcacctcgtaaagatgatgggcgatcgtctcctcatcctccctgcttccgatactccgcacaactccgtttttgtacaaagccgacgtttcgtctgtggcaatgatccccacacgtccgccctgacttaccgcttcttctgtcatacggtttatataggcagttacctgctctgtatttccttccacaaccgcaagatctgcctttggcgcataatgacggtatttcattcccggagcttttggatgaacactgctgtctgtgatcagaagccctctgtccattcgcacctcacccagaatctcctgaagcatttccagagaaatatatcccggtcttagcactaccggaatatcctctgtaaaatctacgatcgtagattccagcccgataccaacctgtccgccgtccaggatcatatcaatggcatctccaaggtcctcttccacatgctctgctctggtaggacttggacggcccgatgtgtttgcgcttggagccgcaacaaaaccgcctgccgccttgatcagctcctgcgcgatcagatcacttggaaaccggaccgcaacgctgtcaagaccgccggttgtttctcccggaacgatctctgcttttggaagaatcatagtcagaggccccggccagaatttttctgccagaagctgtgcctttgcaggaatttctgacacgatttttggcagactggacatatctgcaatgtgaatgatcagaggattgtctgacggacgtccctttgcagcataaattttcatggatgcccgggaatccagggcatttcctcccagtccatacactgtttccgtaggaaaagccaccagccctccgttttgcagtatctgtcctgctctttttatggcctctttatccggatgcttcgcatccatacttacaacctctgctctcatcttctgcaactccctgtctttattggtatatacctgcagtttttatacgactgcatatcatttccggcatgtattttactcagcccattcagactgtctgttcagatgtttattatagtttatttttcaaaaatatacaacctgcagttgtacctgccggatctgttcccctgtacagcttccggattctgctgtcctgcctggggacagcccataggatctgcatgcagcttaacagggacataccttgtctctcacatagcgtctgaaaaatatccctttatttcttttattccggtcttaccagctccagccttttcagaacaggataaagatagctggcgccgaatacccccagttttttcggtccctgtacgggaaggggaaattcctctcctccctgccgcctctcctgcagtttcctaaaaaccatttccacactgcttctggtaatgcttttactgtttacctttctgtccacaaaaatctcatttccccggattttataatgaaactcaagtccccgtgccgtataaaacctttcgccctgcatcaggcacagaacagcccagagcttatccatcgtaaaatcatttttcagttcctctgatattttcttccctgtatcttctgtcataattctgccaccccatataaaaatcgttcatttttctttttattttatcatctgagaaccgacaaaacaagccggaagcaggtattatgtaaaaacaaaacggtgtctcctgccctaacacggaagcagaaaacaccgctgcaaatttcacttttacatcattgcagataataacgaacatccgcttactgaaacaagaaacagaaaaacacatgctacaatcagactgcaaaaataagctctggcgaagttcttcagattgacgtttggattcacgccgaaagcaaataccagggcaatgatccagccaacaaacggaatggcaaacaacaggctgtatccaaaatatccccacataccaataggacgatattccaccggcagatcttcaactgaaattttcctcgatgccggcggcacagacgatgttcctcctgatgatgtacgtgaaccttccaaaggctctccgcatctcctgcagtaccttgcgccctccggattatcaattccacattttctgcaaaacatactctttcctccctgttatccctatttctgtatatttcggttaatcatccgatctataaagccaactctgaaattattacagtgaaatgcctggattccggctatcagaagaaccagatctctgacgatcagacatgcgtagttcaggaaactgcaaagatcctgtactgccatccgatccagagggccggcatccaccatcattatcagataattgaatcctgaaattccattttccaccattgtaattcctgccgctattgcgccaaaaatgcacacgatcaaaatcgcttttgcagctactgcacgaagccagcggtcttcctcttttaaaagtacatagcctgctgccacgacaaggatcgtgttactgatcagtccgctgaaatagatcatcattgccgcaagtcccactgaaatcccaagcagagccattggttttacaggctctctgtttacataagacctttcctcagtatttcgaccgtatcctccgttttccggctgctgtgaataccttttttctcctacttccactcctgttgcttccccgcaccatggacatacaacctcatcatcttcaagctgtttaccgcattttccacaaaacatttttttcctccctgttttcttcttttttatgatatctgttaaaaaatatcatccttatcctttttttcattttttttggttccgccaaaaatatcatcgccggatgcctcatctttcgacctgtctttgatatccctgattccgttcctgcaaaattcttttatatttgcaacagtgatctggattcctttttgcctcataaggatcacaatgattccaaccaggactccaagaatcaccagaagcgtaacaaccggtttcacccatacccatgcatataccttttttgtctcctcagaaaaacagccgctgcatatacgtgtttttacaatcggtgcattccatacgcttccttctaccgttacccattctccaaacttatgctttgtttttggaattttttctacttttatagtttcaccacagtaaacgcatctttttacctgggttccttcataagtacaggtaggctcttcctgcacaaaccactctttttcctgtttatgctccaaaacagggatttcccgggtatccagccattctccacaatacttacagtaaacagattcctcgcctgctgaccaacaggttgcctctgtttccacttcccagtctcccggttcatgttctgtttgcgggatagcttccgtgtcacagatttctccgcacaccttacaatggcgaactttctcaccctctccctcacaggttgcctccgtttccacctcccagtctcccggttcatgttccagcttgtccagagtcttttcttcacatacttctttgcatactttacagtgctttacttttttccctgccttttcacaggttgcttctgcctccacttcccagtctcccggttcatgctccagcttgtccactttttcttcagcacacacctttttgcataccgtacagtattttacccgttttccctctgctttgcaggttgcttctatctctgtctcccagtcgccgggagtatgtcccagagcttttgtctcctgagtgttacaaatttccttacattctgtacatcgctgtaccttttttcctgctttatcgcaggttgcttctgtctcggtttcccactctcccggagtgtgatcatgacctttcagaacatcatccaccacgcacaggtatccggccttgcccactactctgattttcattacttttacatttgtcacatccagatttacttccaccggttccgtggtcctgcctattccattctgttcaaatgcaagctggtcatccagataaatctgtacgttcatattacagttggtagttgacccttcatcaataatcagtttaccggaaaaggacagatattcctgattcaggttatagagggcataggattctgactctgaagtcataggattcttaaagtactgtcttcctttatgtaaatttccaaaggtgtccttctgtatacaggttttctgctcaaaatcaacggaatcaataactgtcagctcctcaagagaagcatatgtcggcggtaccgtccgttcttcagccttagtaaactctgcttctgccagagaaatatattcctctccactgcttcgtatttccagggttcccacaccggtaacatcaaggtcaaaatcatgcgcttccgtctgccttgtcagccccgccttactgtacagttcccttccatctccgtaaatggcaatgtccatcacacaatctgtatagacatcctccgcaataacaatcttacctgaaaagcgtgtatactcgccatccagattatataccgcataggaatttctgctggcttccatatttacaatattcccgctgtaagaatttccataggaatctttcagttctttttcccatatttcgcattcattgctgtcttccatgtgcatatcctttaaaagcacattttcttccgcatgtgccacgctgcaccaggaaagcagaaagacaagcattgccacaatcatgagaatatttttgtgcactttttttcttttgttctgttccattcctttatctcctttgacctgtttataaaaattttatttttttcaggtacatttatcaagctgtggcaatgggtaggggcagattattttgaaattaaaaaatattaaaatgctctcttctttttactgatgaccgtgaaaaacatcttcctgttgtgttcttttttctcttttcttcttcctccaaaattttctctggtttttcgatatagtctgtatccctttcctccttatcaaaattattgtagttccagtcaatacactgacaaacagcagaacaagtactgccggcttaacccatacccacgtataaatattttttacttcttctgcatcacagacattgcatgtacgtttttttacaattggagcgttccacacacttccttctgccgttgtccattttccgaattcatgctttgtttgaggtattttctctgtttttactgtctcaccacaataaatgcatctctttatccgagttccttcactggtacatgtaggtgcttcctgttcaaaccattcatcttcctctttatgctccagtttgggtatcatttcttctgcacacatctttttacatacggtacaatactttttccgctttccctctgctttacaagtcgcttcctcttctactttccagtcacccggcgtatgtcccagggcctttattttagatgtattacatatcgccttacattctgtacaacgctgtactttttttcctgcactttcgcaggttgcctctttctctgtttcccactctcccagaatatgaggactcaaactgtcatccagcaccaataggctactgtctctgccaaccagtctgattttcattgtctttgcatttgtcacatccagatttacatccaccagttcataaatctcacctggcgtacttcgctcaaaaacaagctggtcatccagataaatctccacttttgtattactgccattgtcatcatccccataaatctccagattacccgaaaatgaagtatatttcatatccaaattataaagagcatcaacttcagaatctgtttccccgtaagtatcaaaccactgagctcctctatgcacttttccatttatatcttccgttacaccaacccactgcccaaaaccaaaatcatcggaatcaataaccgccacttctctaagcggagtatataccgacggcactgctctttcttctgctttcgtaagcattccattttccaaagagaacattgcagttcccccgcttaatatttccagttttcccacaccagctacgtcaaggtcaaaataccaagcttctgcctgttctgtcagaggcccccagctgtacaattctctgccatccccatagatgccaacacttacatacggctggtcaatcaccattttacccgaaaaacgagtatactgaccatccagatcatatactacatagccactctctgatgcatctatctctaatatattcttgctgcagtaatttccattgggatctttaattttcttttcccattccccatcaaatgatcctcccaactcttctatgggcatctccttcaaaagcacattttcttccgcatgtgccacactgcaccaggaaagcagaaaaaccaacattgccagaatcatgaaaatacttttatatactttcttttgttccatatctttttcatctcctttgaatctgctcataatttttcaggtgcatttatcaagctgtggcaatggataggggcagattattttctcagatgaataattgtcagactgcttgaaatcattcattctaaaaaagtgtcccttctttctgcagaactttttcgtctccgtcttcctcaaataaatgtaattcatttcccttaaaatcaaagtcatacacatacacaaaactgctgactgcccactgaaaccggaataccagctgtccatctacaacggaataagttccgtcctctccaaagccgataaaagttccgtcactgaaaaactgtatgtcctcgtcataatccacactgccgtcatcatccacttcataccatgttcccaccagtcttttttccggatctaacgaaatgattcccggcttattgaaaattccaatgacaacacatacaattgccaacagcaccacagctataatcacattccgtgtaactgttttctttggttttttattcctgcttcccagttcactctttatgatctgcttctgtaccggtttaccgcatccggtacagaaggaaactccatcttctaatttttttccacaatatttacagtacataattttctcctttttcatcatacgttcttttttaccaaaatcggttcctggctgtgattaagtaactccaaagcagcagggaagattcactccggattgatatttacctgtttacagctgataatatgtaatcaattaatttgaaaaactttatgttcagtcatcagatgaataagataccactttattacctgagtaatcaaaaatctcttcttcaccgtttgaccagtatacatcaattgttccattatctccgacaaagcaatcatcaatggaaatatattgtccattctcatcttcacgagcacttaaatcagcaattgtcctgtttctgcaatcaatgattccataaaaatccacatcatcttttctgaccctgataagatttggatcttcatccaggacttctatataatcatatttgcaatcaatcagcatatctcctttcacgttgatcagaccagctttttcctgttcatcctcttcctcagcgtaaactgctgccaatccatgggtaaatttgtaggtactgctatacatgcatggaataatctcttccccatctgaattaatatatccattcataaaattttcgctgtcatatacctctagtaatccatctgaaatatcatcactgtttaagttctttgaatctaattctgtgatcacttgtccgtctgttgtggcaatagcatctcctgaattctgggacaaaccaatatatccctcttccagatagttatgtaacattccatctatggtaaatactgaatttccctcatagtccacacatatgggatttccaacaaactctttcgttaagatgatattcgtatcccatgaaatttcctggtattcagccagaggggtcagaaactgtccgtttttatccaccacagccgtctctataatgtaatcatcgtctgcttctgtatctttacgaacaaagaatacctcgtttctttcatcataatatacttgagtatatactggatccactatacaattaccgtttctgtctataataccgctctggtctccatatccgtcattatcttcatcaacgccaactctcagaaattctccaaaattattctcaatggtataattttcaccatatggaatttctgtataagttccatcattctgatcccaaaatccatatttcccatcattattcaaaatccaggattccttttttctgctgtcctttgaaatatcatcatattcacattccagaaccagctttccctcaagcatatctacaagaccatattgtccgtttttgtatacaataagcagatcttctgtctcttttgagttttctttttcagtgacataaaaataggaaccgtatgcctcctcccagagaatttcatttttcagattcattatgccaatccggttatcttttgcatatattacaatctgtttatctggtacatactcaattttttcatagacacagggaagcgatatttttccatctaaagtgaaaaatcctattttttcctgctcctcactattctctcgtgtatatttaatcccaaccccaatttcttcatcccaaaaagaatgcgctgattcaagacgaccattttcatcttctcctgaaatgatttcatttccattgcagtcaagaaaaactgacgtaccatcctcgtaaacacgaatgcatccatttgaatccatatacaactcaccataatccccggatgcaattactttcccttcaaaatctcttatctctgttgttcccccggacagattgatctcatatctcttctgtcttaaggaaaccgcatcaatctgtccctgctgccagtctgtcagtatttctcccttttctgtaacaaccctgcttccctcatcgcttattaccgcatatacgccacagtcctcttcctcttcattataaatttcaataattttaacctcttccggttccagtatcacctttccctctgaatttacaagtccctgttttgttccctgtttcaccacaaaattctcataaccatcagcatcctcaatatagtcataactgttctcgcagattctgtttccctgcctgtctatcagaaagtattcatttccttctcgcactactgtagacttatgctccatatcgtcatctctgaacgcccggacgtaatcatacatattttctccgtttacgttaaaaaaacgagtaacaacattagccttactgacatagttatgcccacctaagtctatcccatccgcataatattctgcccggatcagtccattttcccctggttctgacaccatatcataaatgggagggatcacctcttctcccttttcattgacatagccaaccttttttccggtatgtccgcctttgatttttgtcagccctgtttccggatctgtccaggtatcttcttccattgctgcattttccttagattcttctttttcttttgcctcttcctctgccattactttagctgcccactcaccttttgctcttgcctctgcgtctgccagtgcctctgttcttttggcttccgcgctcatggaatcccccagccggtctgttccttttttctccgtatatattttatatccggctcctgccccggccactgccagggccagaactgctactgccataataaccctcgccggctttttagacgttttcttctttactgaatgatttttcttttctgacttttccggttccttttttacaggctgtccctgaaccggttttccgcacctggtacagaatattgctccatcttccagctcttttccgcaatgtttgcagtacataagccatccccctttttctgaaaaaagcactgccttttatgcaatgctttttcctgtttttatttctctatcagaattttcactttattcgtgttccgcattttctgcagaaaatatcatctcccgcataatttccgcagttgggacagtactgatttccttctgaatcgctttccagacggctgtttccaatatcgctttctgtcaacagttctgtacggatttttctgatattgtcccttaatattctgcattttcttttaacatcatcaatttctttttctaccagtacttttttgttttctgcttcctgtatctgtttctgatataattctttcaccgactgttcacccatgatcagttctctgccccctgtctttcttttccacaaagaggacacttctctaatttacggtcataaatctgtccgcaggagcaaatccagttctctccccgtgagccctctcgttttatataactgtccccatattgtctccgcagcagttttaagtcttccgcaataaaatcactgtccatggaaaaaccgcttccttcttctgctttttccagaaacacgctttcttctacagttgtctgctctgtacaaaattcctccgtgtaagccatatattttctcacatataacttagtctctttcaggtcattaaaattacagtccagctgttttccataaagctggccgttcatcaccacttcactgcccttactggatgccggtttaaaaaatgtcataacaggaagtacgaatttctgtccgctgtttgtcataagatggacttccgcctcgatcctgtcaatcgttctgtgaataaaactcataaccttcaaagatgcggtaaatgtatatccgttaaaagaatagctttgtcctatcagaagccgtattgtcctgaatggaagtacaggatcataattggttacttcaagaggagtatagatgtactttatcttttccttctcattttccttttctacaagtttagcgcatatataacctgctgcagaggcaacaagcaccagccacactccggaatctgcttttaacgacatccccaaatattcatagtaatctcccgtattattctgaatccatagattggtaaaaaagcatataagccaggtgcctgctgtgcagactattccccacaaagacgctgatttcactttctgatacatatgaaattcagagtgatgcttaacaagctcataaatgcacagcccgtaaaccaaaagtaaaattaccatcagtattaaaaacagtataaaatcaagcataagaatcgagcatagttttgatcctgaactccatccgtttcctcttatgccctcttcaagaatcggcagtgacgtgattatattaaaaaagtttaaaggataatctacctctgcataatccatgatccatgcaagcaatggcacattcacccaaggcagcagcaaagaaccacagcacatcatacagactgccagaaaaagaattttagaatttgtccttttcgcagtcttttctgtttcccgctgctgaacttctctggctgtggctggctcagacctccatttgcggcatcttgcatactctcctttttgaagtctggtatagttatccagcttcagatttaagtcctgctcttcctgaagcgtctcttgttttttcttttccagctctgcctgctctttttccagatctgccaatttctcagcaagtttctgtgtttcctgatcgtatccacactggcttactttttgtccacagtaaatacagaactgggaatctcccctgatttcttttccacatcgtaaacattccattctttttcccttacctttatcatcttttctttgtctttttcttattttacctttgctttatgcctgagaacaataagtgacatcagttgtgggcagatttcctttgtttttttcaatttttttacatttttctaattgtggcatagtttgtaggcagtttttttcttatacttgtcacacaaaaacagcaatttttcttttttcacagccaaactatgataaaataatacagatacacaagaaacagaatgtgaggaaaaatatctattatgtccgaattttcaaatatactcagtcagtttattcacgaaaaaaatataaaggtctatccgctcagtaaatattgcgattttgaccgtgccactatgtacaaaataatcaacggaaaacgaaatcctccttctcgggatatcattgaaaaaatgtctgattttatgcgactgacacctaccgaagatgagcagtttaaagaggcttatgaaatttccaggattggagcaaataattactatcgaagaaaaagtacagaaaattttctcatgcattttccggataaattttctattcataccggctccgccgctgattccggtttcaaaaatgaatcccggacgcctgcctgtgcctcaattcagacacaggtagaattaaattatgctctccgcaatatactgctgacagaatccggcaaaggcgaaggaaaagccgccctgtttatgcagcctgatcatgaagggctgttcagtcttctttccagcctgaatctgggatatacactggaaatacgccacattttctgcctgagcaacagcgagatcctgaataaagaccatgaactgtataatctggaatattttaataatatctttcctttatatctccgaaatctgaattatcaggcatcatacttttatgacagtattcattcacatttttttaatctgaatgtcctgccatattttattgtcacatcccggtatgcggtttccttttcctcagattaccagtatggtattttttacagcgatccgaatatcgtagctcagttctggaaaatattttattctttccagactaaatgtactccgctttttcagatttttcatatgcttccaaataatttacatatgctgcagaatatttctctaaatgccgctgacagttatctccttcagccggaagcatgttttactccgtttattactgacaggattctggaacatgcgctttctcccatgcttcccgaccgtaacagactgctgcctctcattggtgcattttttaataaaaatacagaaaatcttgccagtatgcatgtttattttacaaaaacgggaatccagcgatttacacagacaggacttttaaaagaaatcccttctgatttttatcgcccgtttcttcccacagaacggctacagatgcttcagaagcttctgccctgctgcagccagggtacgtaccgtatgctgaaacagcccctcgatcagcttccaattaatcttcacctttgtgtaaatgaaactatgggttatttttcctttgataacgccgaaaaccagaccacctatcttatgtttaatgagaccgggcttctgtctgtttttctcgattatctgcagtcacttgaggacacatgtttttacacacctgaggaaactgtggatttcattaaatgcgaaatccgcacactccagtaccggcagctgtgcagtaaaaaggaagcagttttacccccccccatcaaaaatttcaaaacgcacactttaaccactgacgccttgctcctttcccggaaatatgctaatctgagcatatatgatttccggagaaaggagctttttatgagtattatgaacacctataccggcagaaaatttgatcccatgcacatcaagccgaaaaatatctgtctggaagatatcgcgcacgccctcagttatctttgccggggcggaggtcagactctgatcttttattccgtagcccagcactgtctcaactgtgcagaggaagcccgggccagaggatggtctgaccgcatgattcttgcctgtctgcttcacgatgccagcgaagcctatatctcagacatcatccgcccggtaaaggcgcatctgtctaattatcttgaaattgaagaaatgatcatgaatgtgatctgggaaaaatttaatctgaatgacctgtcttctgaagaacatatggtgtggaaacagattgacaacgatattctttctgcggaacttccgattctgttcccgggtgaaaaaaatcatcccaccataccgcttcagtctgtgcctgatctggaagagcatcccttccgggatatggaaaaacagtttctggctttcgcacatcagctggggatacagtaaaaacagctcagatatattctcttcttttattaaccaaacagaaaaggactgcccgaacctgatattttcaagttcagacagtcctacttgtatttcaaagcatattcaaatacccaatgattccctctgctacgaattttgcttcttccggttttaaattgtatgcattcacaaacataacattttccggcatttgaaattcactgctgtaaactcctacgtcaatgggctgcggtaagcttcttgtataagtattacagtcctgtgccgttttcccagcaggcaaagtaatcagtagcaatggctgataagttcccagccgcccctgagcaagcatttctgtttgtacatccgctccagcaatcaacaaactctctatttctctgagaatatcctcctgccgtttaaaaccagtctccggctcttcctttacaaatatttcaagggcggtaataaatcctgccagctcttcttttcccgttttaaaagctcgtccaatacgagcatttgggctggccgccatccggcatgcctcaatcagatccgggcgtccaacaatcaaccccgtactctgcggtcccttgatatgttttccgccgctgaatatgcacaaatccgctcccagttcttttgtataataccagagatttgattttggcggaagctgtgccgccgcgtctactaccaccgtcacccctttactctttaaaaccggaataatttcttcacaggaaggaatcccttcctcatacaaagtagagggaaaaagaaatactgcggcagtacgttcgtttaccgctttttccatagcctctgccgtaggttccactgcaattatctttgcgcctgttaacccgatcaatttccaataaggaatctgctgcctgaactttccatcaaatagcagaatctcattttttgttatatcctctacatgcggaatcctgtccaatttttcgccttcatttccgcagatgcaggctgcagctgaaagaatcacacctccagcagcaccagtcgtaataaaagccgcgtcattatttgtaagctttgcagcccgttcacaaaccacatccagcaggtgcagataatctacaaatccacttcccgcttcctgcattgcctgaaatgttctcggatccattaaagacccacccagattggtatacgtttcgctggcattaataagcggagtaatacccattctttcatagaaactcatactgttctcctgtatcatttcatttccaaaatattatcactcatcttttcccctgcgcagagcatgaccggcaagaatccctgtaattgttccttcctccatggccggcagtccgtttacatacagtgaacggattccctccggttttctccttgaagaagaaaaatctgcacagtctcttacatttttgtaatccatcatgcatatgtcagctttcataccaggcttcagctctccccggccttccagatgatacatttttgcaggcatggaggtcagcttttttattatatattccaccggcactccacgttcccgcatcatacagattatttttgcaaaagacccaaatcctcttggatggcacagaatacctgttggaatcgtatcgcttccaatggtatatctgtcatccaggaaaagctgatactgatcctcatataattttttccgcattgcctctgtgtgattgtccactccggcaaacccaacctccagctcgttttctaccagtaagcggatcacggtctctgaaaaactttcatgattttctcgcgcaatttcatcaaaagtttttccaagcctttcactgtacggatctttggttaatataacccttgcagtctgcccttttccaaaaaagtaagagtggcgctcatccatggcttttagcaggtccggccttaatttctcagaagtgagcctgtccataatctgttcatagccatctgcctgtgcccagcccggcagcagtgccagaaccagccctgcccctaccagataaggataatactcataatataccgtatttcctgatgcttctatctccttaaaaggctcgaatacagaatgataatcttcttcccctccggttctgtaatgaagcatattcagacggactcctgttttctttgccacttctgcagcctcagctctgggattcagcggaatttgcccgtcatccagccgctgatggacacaaaacagaccatcatattcctttacaaccttacacaattctattaattctctggtatcactgtagccgccaggataataagaaaggcctacggaaaatcccacagcgccttcttccatcgcctgccgcataatccgcctggctttggacagctcttcttcgtccatagcagtttcttcaaatccacatactatctgacgcactgcattatgcgaaacatttgcagctgcattcacggctgatccgtccaactgatctaaaaattccccgaaggaacgccactctttcaagtaatggcggtaatctccaaaaatgcctgaattaatacgaatagaatcaaaaaactgttccggcatcatcggagcaaatcccaacccacactgacctgtcactaccgttgaaattccctgataaaccgcattgggatgctggcgattttttaaaatactcagttccgaatgtgtatgtccatctataagtcccggtgttacatataaccctgaagcatctactactttccgagctccagacgcatccagattctgtcctatttgtgatattctgtcccgaactacagcgatatctccataatacggttttccgccggtaccatctacaatcagtccacctttaattaacagatccataaaatcgcctcttttctctatctgttatggctctatttccacaattccttcaatttcaaccggtgtatttcctggaagggcatttgtgccaatagcagaacgggaaggcgcgccaatcttctctccgaaaagttccactaaaaatccggttgctccgtcagccactttgggctgttcataaaaatctggttcgctctgtacaaagatcaaaacctttacaaatgatttaatcctatccaaacttcctatatgtgctttaattacagacaaataatttagaattgtccgacaggctgcttcctgtccctgttctacggtcagatctttccccagctttccctgtgggccgtctccatttatgtacgcgccgcagcctgaaatataataaagattctttcctaacggtttaacactggaataaatgcccccttttcctggtgcaggcggaagttcataccccattgctttgattttatcctctattgtcatattgttttcctcatctttcttctatggccgcacagcagtaccatcctccagacggctgaaaagccagctgaagtccatctccaccggcggatattttgcggctgccttttcatcaaaatcaacgccaatgccaggcgcatcatctaaatatgcataaccttttcgtacctgcggacatccagggaacacttcctcttctgcctcattgaagcccgcaaactcctgaataccgaagttaggagccgcaagatccaggtgcatctgtgccgccattccaacagggctcagatcattaggtccatgccatgctgtcctcacatgatactgttcacaaaaagcggccagcttccttgcaggtgtcaagcctccaatatcacttaaatgacaccggataaaatcaatccactgattctgcacaagagttttccactcaaccggatgagtaaataattcacccattgccaggggaaccgccgtttgctttcttatatattcaaaatagtgaacttcttccggcggcaaagcatcttcgataaaaaacggcttaaactgttctaattcctttacaaagctcagtgtatctgccagagataaacgttcgtggatatcatgcatgatctccagatcccagcctatatctgaacggatccggtcaaaaagccgtatcacactctgcatataagtcctggaggaatagtaagcacctgcgggagcattttccgggtgagacattttttggatcgttccaccaaaattacctccgtatgttcccatatgacagcggatataacggtatccttcctccatatactgatgaattttctcctctacctcttccggactatttccgtctgcatgccggtaaactgcaattccttctctacattttccaccaaacagactataaatcggcatatttgccaactttcccttaatatcccaaagagcttcatccacacctgaaatagcattatttaacaccggaccgtttctccaataggagcttcccatcatagactgccataaatcttcaatatcatggacagacttgccaataaacatgggacgcagatactcttcaatcgcagtaacgactgctttatagcgccatgtaaatgtagcgcaacccagaccgtacaaccccggttctgatgtctctaccttaacaaccactaagttaatatcatgtggagctgttacaaatactttaatatctcgaattgtaattggtttcataaaatcctccctccagtgtcagctcttaactgcaccgcttgtcattcctgcaataaaatatttctggaaacacataaacaatatgatcagcggaatacaggacatggtagacgctgccatcatatcgttccagtgcacctggttctgtgtattcagggaaacgattcccactgtcagagtcttcaatgaatctttcgaaatcaaaacagaggaatacatatattcattccatccattgatcaatacaaaaattgccacagctgcaattcccggaataaccagcggcaatattatcttgcggaaaatcgtaaaactgcttgctccgtctactcgggcagcctcatccagctccactggtattgtcttaaagtaagaagtcatcatccaggtactgaaggcgatattcgtcgcagcatacacaatgatcaatccgagcagggaatttgtcagatgatatttcgtcagcactgaataaaaaggtacaacaagcattacgcttgggaacatctgagttactagcaaaaatcccataaacgtcttttttccgcggaatttaaaccgggttacaccgtagcctgccagacaggaaaaaactgtacagattaccacagaaccaatacaggtgatcaagctgttccaggtcattgtcccaaaattatacaggccaaaaaactttttaaaggattccagagaaatagtgcttggaatccagataggattcggcgaataggtctcagcctctgttttaaatgctgttgatatcatccagagaacaggaacaagaataaacagggacaaggtaattaaaaatacatatcggaagattcctcccgcaacttttttcttagtcatctttcaacaccatcctataaagtttgctgatcagatagcaaattgcaaatacaacaataccccatgcagcagccttgccaaacctaagatcattaaacgctgttccgtaaatattcaagctgataaggtttgtcgccgtgcccgggccgccgcctgtcatggtataaacaagcgtatactgcttaaaccaccacacactgtccagaataatcgttgttgtcattaccggctttaatcccggaacagtcacatggagaaactgctgccacttattagctccgtcgatcatagcagcctcataaagatcacttgaaatactctgcagacccgaaaggatcattgtcattaccagtggatatcctttccagatacagactgctactaccgcgggaaatgccagacttgctgaaccaagccaggatatatttgaagaaataatacccaatgacttaagaatgctgtttaaaactccgtacatcggattcatgatccatgtaaacaataaggcaataacggtttccggaaacaaccacggaagcataaagatcactcggaagatggttcttccgggaaagcttttattcagtacagatgccagaacgaatccaataagaaaatggcctgccaccaccagaatcataaataaaaatgtaagcagaacagacgtataaaattccggctttgtaaatgcttcaatataatattttaagccaacaaacttccatttatttaccagatttgtattataaaagctcaaatacactccatacagcataggataaacaatcagcaataccattaccagtaagctgggcgatatgaatttatatcctgtatgctgatatttatcgaattgtccagggtgaggctgtttttttctgctggctattcttcccattccaatacacctctctcttttcttctaaattaaggtaaaaaaatgccgaggggggattttgtcctcccctcagctattaatttttttaatttcttttagttataatcttccaaaagagtatccagctcttcctctaatgtttctacggcctcctcattagtagactcttcactgaatacagcggcatatgcatcacccagaagactcttcaaaccgctgattcctgcaaaattcactggaggaatgcatcctgcttcaatagtttccagatatcccttataatcctcacctgtaatatattctgccttttgtccctctacagttgccggaatcttaccgctggactgccagaacattaactcagaatcattattagtaaagaatttaagaaaatcaactgccgctttcttctcttcctcctctgcataactgcaaagcgcatatccctctgcattcaacatagttccagagtgttctcccggtattgggaaggagccaatcttaccttttaattctggattgtttgcataagctactccaatggcattgctgccagtaagcatcatacttgtatagcccatggaaaaatagtttgctgctgtggcgtaatccacttctgtaattcctgtaggaactacgccatactcgttattcatatctgtccagaaagaaaccaaatccaggatattatcacccaggtctgctttccaggtttcgctgtcttcatcataacttacacagttacaaccattgctccagagatatgacataaaccggctctggccagagctgttattggaacctaccatagagaatccccactggtcgatctcaccgtcaccgtcagaatcttttgtcaacgcctttgcgcattccaaaaactcatcccaggtagtgggaacatccagtccagcttcctcaaaccgatccgtacggtacaacattgccaacggctgtacatcgatgggataaaatgcaagtgtgtcatctaatgtacacgcttctgttacaccatttgcaaatgtacccaaagtctcttcatccagataattattcaaatcgtccatcagacccagatcataaagagtaggcgcctgatctgcactggtaaaaaacagagtaggaagatcgtccggagaagttaccattgcagccagttttgtataaatatcattggagctgattgcctgaatctcaatattcacattgggattttcttccataaacttatctgcatactcatatacgtactgtccatgtggatcttcgctcgcatatgcacacataatagtaatatctactttatcaccactttcttccgcagatacttgcaaaggaaaagctgacacagacataagacccgctaatgcaacagccattgttttttttaacataatatttttcctcctaaccttactattttgtttacgttttcgacaaaatcaaccatatttttccattatttccaatcatttcactgcagttttttgattttccgttgtttgtctttgtagctttagtataacatccacattgagattattctcaccatttttcaatttaaaatcaccatttcttggatatatattgtcaggagttttttaatctgcccccttcattctctcaccagtacagttttatatcctcgctttacgaaaaagatattcccttttttcctctgaatccttccacatggtatacatagttccagaatccgttttatactgttccatctgctttttatattgaagaggagaaatccccataatatccctgaactgccgcagaaaggtattcatgctcgaatagcctacagcccccgaaagttctgtgatactaacatgggattcttccagtattctcaccgcattggcaatacgcaccgaattaatatagttgacaacgtttttcccaaatatctttttaaaatttttacttattgtattgggctgaatataaaaattacggctcaaaactgtcaaattcaattcctccgcataatgcaaatcaatgtaattctttatatcgctcatagccttgtatgtgccactgatatccttcttttccaaattcaaataacgttttaagataattgtcagttccagaagcaaagcataaaccatgtcaccgcgtccttctccgttttctcttgtttcctcccgaagcagccttataatttgaataattctttgaaaatcagacagttcaagattctgtagtttctgggcctcttttaccgggtgtgtctgatagacttgcatatagctgtttatgataggcagattctgaagaaaagacggcatcaccgtcaaaccgtaacgaatacatggagtacgagtaaacttccgaaaatgaggatctgcaccccctataattaaaatactgtttttccctacctcataatccatattcttaattttatataagccttccccttcttcaaagaataaaagctcgcaggaattatgcacatgaaatataggatttgctttgtaatccccactgtagcttacatatacattctgattattcaacgctacattatgcgcatcctcctcatatgcattcaaataatgctctatccgtcccacctcttattcctccttcctttccccttctcgacggctggcaaaaaaatcacggttctctgtcaaactcctgtttctctttttatactgaagaggagacacgtccattttttccttaaactgcctgagaaaagtatttacattgtcatatccaactctctctgataattctgtaatacttatattttctgtatccaaaatcctcactgcattagtaattcgtacagaattaatataataattaatattcttcccccatatttttcgaaaattcttactgattgtattgggttgaagaaagaattgtttacttaattttgaaagacttaattcttcatgatagtgcagatcaatatatgccttgatctcattcatagaattataagtgctgttattttcctggctttctacctggagcaggcgttttagcaaaatagtcatttccatcaaaagtgcataaaccatatttccactgtcaccacttttattttctgtttcctctctcagctcccacagaattttaatcatacgttggaataccgcggaatctataccggataatttacaatgctgctcaggtgattgtgtctgaaaaatgctcatatatccattgacaataggaagcgattgcagaaatgacggcatcagcgtcagtccatagcgcacatagggaaccttggtaaaatgaaaatgatgcctgtccgtagccccaatgatcaatactgtattgggcattacagaatacaccttatcattaatctgataatccgccccaccttcctccacaaataataattcacaggaattatgcacctgagtcaaagttcctttctgataatccccactgtaacttacacatacatcctgactgtcaaaagcagcgagaagttcttcttttatataattattcaggtatgattttggagttttcatcatattgtagtcctttcctaggaaacacccttttagattccatatcattgtaccatacaaaactatttattgtcctcttatggtttaaatatccatcaactgtatatacaatatatttctgattttattaattcttttaaaataaccgttttattcatgttaagtattatttgaatacacaaaaaaagttcttctatgatttttgtatcatcacagaagaactttaatctactcaaaactattctatttattactaaatattccctcttaggcactaatcattccttacttattatcttcccctatccgacttttacaatataggttcctgaacttccatcctggaacacagtctctcccaggctgcgaagaagctcatggttcagattttctccatatttgtttttctcacaggaacctacaaaaatataggaaacatcatatttttccacaagctcctttacctgtttttcatcctgtgaggtgtagatcagctcaatatctccgctctttgtattcagatccgccacatcattccgccacagccattcatggacataccatccaagaactgtgggcaggccggtcattgctgatacacgctcatactctgtatagctgtccccgtttgcctccagaaccaccggagatccggtaatattttttttcagccatcgtattccggctgcgtcttcagggaagtccgtttccagaaaagccgtggcattcagccctttatactgggagggatcctgcacatttccaaaccatgagctgacgctgtttccaaaatatccccaggtccacacaagaaggatcagagccacccctgcggctgcctttaaaaattttttgtaggaaatcaccatcagccggaaaatcacataagccattgtcattccaaacataatgtatgcctgatacgtgagcttgaacatggtattggcacgggcatttccgttttcgtaaatatcccgcacatacacaagctccgggatcagtaccagtccaatggcacacagccccatgatcattgcaaaaagatccggaagcttcagagattccataaaatgaaaaatcgtcttatgctttgcgccgctgagcttttccaccagaagaacgatcacaaaaatcacagtcagaatcgccggaagcccccacaggatcaaaagctgatgaggaagggaatgatactgggccaccgccacaccctggaccattgtctcaaaattcagggtaaaaggaagaatcaccacggttcccacagccagaacctctgctgcctgagccgccgtaactccaaggatccatttggtctgacctttcatcagaacaatattggtaaaaagtacaactcctcctgttaccacaaagtaaataacaaaatcccagaaattcgtccagtggaacataccgagaagcactgccgccagaaggatctgaggcatgaaaagctgttttccccagaattcccctgtccccggctgtcccagaacaaaatcttttttccgtaccatttttatccaggcatataaaagtcccaataacagaaggacgaacataatattgaccacgtgggcatgaagatctcccagaacaaacgaatagcagggaaattcatgaattgtcttatccggaacatccgggttaaaaccaatatatcttgtcgcgtcaggaaaccagtagctgtccggcccctgtcctgtcagtttctgaagaaaaggaagcacctgtccataaaccacatagtgcatatttccggcaatggaaacagaaattcccgccaccacgcctgtgatctgaggaaaatatcttctccatcccactgcgcctgcagctctttttcccattctgtccctggtcatctggtatataagagaaaacggaagggaaaaggcaagtcctgccacaaaggtgcgcatcaggttataggtcaactccacgctggttccggaaagctttgtaaggaatactgcaaaatactggccgccataataatagttgatatttccctctgaataccacaggtcaactgccggaagagtggtgcttcgcatcatggcttccataaacccataatccataaatttttctgttccgtatgccgcaggatgaaatcctgccagataagtccacagaaggaaaaaaacaaaaaacaggatttcctcccagtacaccagatccagatgatttaccggaagacactcgatcccttttttatgctgcgcttttccaagcaaaagacagccggccccacaggccaaagtcaccccgatacaggtcagtgaagtgaatttcaaaagtttgaccgcaacgagaaaccaggttccgaatcctgtgacaaccactgccagaaccttggaaaacatccagcccttatcgtcaaattcccggaaaagccttcctgtcagaggcatggtcacaattcccagaaccattgcaagaagataccaggtccagaaagtccatacgtctcctttcagcagatatgcagacaatgctataagaacggctgcaggaactgcccttattgttactttttttattatatcaggtttcataaattctgattctcccatcttccgactggtatgccagcctgtatactgatttaatcgtagtctctatgcaggtttcttcttcaaaagtcattccctcttcaaaaagaatataggtgatcctctcctgctgaacaagactctttaccctctccggatcccgggaagtataaatttcctttgcgttttccgcccggccataggtatcatatcctgccgaccatgcataatagggccagcccagatacatcatcactccggccattgtcacttcactgatgctgtattccggcgtcaggatcagatcccggctgtccagattttgtgccagccagtctgtaagactgctgtttgtatttaccgttactctgtgtcccggcccgttatctcttactatgatcacaaaatcataaattcccgtgatcgtcagacacactgtaagcactgctgcaagaatacggccctgccattttttccggaacagaaggcacacggctcctgcccagaacattgccagaaatgcataggaaatcataatgtatttatgattcacagtaatatccggtgtcagggagaagctgaaggcaaatacaagtggaaacagacagcttacaagaactgcccgctgaagcctttttttgtagaaaaagaataaaatcagcgctcccacaaaaaagatgccgctcatctggatcagataccaaaggacgcctgcagcgcttttatcctctgcgataaatccccactgaaaggcagcctccacagaagagcctttcataaaaagtctggtctgaagaaccgaaaatacaacagccgtaacagctgtgatcagatagtccagcttaccgtctgagcacacagcaaagcccattaaaatcagaagtcctccaataacagccgctccgttccagaaggaagtcatgccgatgagaaggcctgctgccagcgcgttttccacatacctgcatttccatgcctcctttgaaaaaagcctgttcctgaaccacacaagccctttctccttatggcggcatccctgttccacccagtccagatacatccacacagcaagagccacgatcagaagtccaaaggcaagatgtctctgattcagatatacattaaaattccacagtccccagtcttcatttgttgtatatccgataaatgaagtgttttcctgcagtacctggagcagatctccggcgcgcagatgctcccacagaaactgaaaaaaagtcagcgcgctgcggaaaaagaaaaagagaaccgtcagcactcctgcctttccacttcccacaacatgtctggcaatactgtaaagcagcataagaaatcccagaagcgccagaatacttgcggcgttgtaagcaatgtcaagccggagtcccagaaactccagatttcccacaagaaactgaaacataaaatgatattttacgtcctgtcctccaaaatgaggatactgggtaggaaaattattctgcaaagaaaaagaccgcatcattgccgtatggggcgcataatcaccgaacacggtaaatcctgaatacagaatcccgtcctttatgtaaaatacatagaacatgatccaggtaagaaatacaaacagcacagaaaaaaatatcagttccttccaaaacagctgtttatcctcaaccagacccttatctgtaaaaatccttttgtttttcctgtatctctgaatatagatgcccaaaagaaaaacagctcctgcagccattgtcagcaggtttccgtatatcagcggtttgtctgctcctgcggcgctggcagcccaggcaatgagatacgttacccagccaaaagcaagcattccaactccaaatgctcctggcagaaccagccagatcctgttattttttccggttttcttctgtcccacaaaaatctctgcaagctcttttccgcaaagacttcccaggatcagatacaaaatcccagtcatacatactcctctgtttttatttttctgttaatttgatcattaacagtataccaaagtatcctgattctgaaaatacaaaaatcgccgtctcctctggtaaatttaaaggatacagcgattttcttttttatttcctgctgctgaggtacgactctataccatccgcaactgcctgagcaaccttttgctggtattcttccttctgaagaagagcagcctcctccgggtttgtcaggaaaccacattctgcaatgatcagtgttcccttacttcttttcaaaaggtaatagctggtatttccctttatggtacgcggtttttgaggattcagtttccggttcatactctcctgtacttcctgtgccagtctttttccttcctgggagctttcataataaaagacctgcggtcccctgacatccgggtcagaatagctgttctgatgaatactgacagtcagcacaggagaagcattttccagaaaggcgatccgcctctgcatatcctgagattttttatttggcgcagaagcatcataaagcccctgatctttctttcgtgtcattaccacctgataccccttatctgtaagtacgcgttccagtttacaggctatcttcagattgatttccttttcctccagtccattaagccccaccattcccggatccgctcccccgtgtccgggatcgaccgcaatgatttccttacggttttcctgttctttcatggttccggaaacctgggctgcctgtctggacaaaagcaaaaagcacaccagcagaagcccggacatcacaagctccatcacatattttttcaagtaaatacatccttaaaccacttctctctaaatatatatttacttttgtctacaaatacgccttcagctcttcaatatttctttcctcgaactttttcagttcctccatcagctttctgatatccttctctgtttctccttcataccggttcagcttctgcagggcttctgtgatccccatactgcttccctgtatcagcatcgcagctatattggatgcggaatgatccttcatagtctgtatattgaccataagatacgtacggattttttcaaaagcactcaggcctttttcatcataaccattttcattcagcatccgccatgccttttcgtggactttctggtatccctccagatgttcactgagaagcttctgaaaatctgcgttctcagtaatatccataagctgccttacggtatccactcccatctgtgaattctgataaataaaattcaaaagctctgtatttgcgttcatgccacactctcctttttctttcagtatgcacggattccccaaaaatatacagagtcctgtgaacctttaccttcactgacagaccttattcatattttacaatttcctttttcagtcttttcataattcttttttccagccttgaaatatatgactgggaaatccccagaagatcagccacttccttctgagttttttcctttccctcggcactgttcagtccaaatctgagacggatgatcgtctgctcccggggcgtcagcttgttaattgcttttcccagaagtgtgatctccacttcatcctccagcctgcgggagataacgtcctcatccgttcccagaatatcagacagcagcaattcattcccgtcccagtcaacattcagcggttcatcaatagaaacctccagctttgtcttgctgttcctgcgcagatacatcaggatctcattttcaatgcatcgcgaagcataggttgccagcttgatcttttttacaggattaaaggtattaattgctttaataagcccaatggtcccaatggagatcagatcctccaccccaactcctgtattgtcaaattttttggcaatatacaccaccagtcttagattgtgctcaataagaagcgcttttgcatctttatcctgttctgttcccagcttactgatgacataggcttccctctgcggctccagcggtgccggaagaatatcatttccaccaatgtagtacagctctctcggtcttgaaagaaccatcctctgaatcatctgaaacgggtaataactgacgcctgctgctgatctgttcataattatatgcccctcctaatgcaataatctggaattcaacagtaccttgtattcctttcccaaagcggagggttcaaaagccagggccagcacaggccttgatatgcgaacctcttctgcgggagtatggatacaaagattctccaatgtaaccgccagcatcagcttttctgcctgtcctaccgtacggcaggacagatagtggggcttcagtccggcaatctctgtacttttcagctcccccggattctcgtaaaggttcttcagtctgtctatcaggtcctctgacagcatggtctccagaatttcaggtttcacaaccgaaaccggttctccgcttaccggatcactgagcagatttcctgtgtcataaaacccgtaagcagactgttcttttccctgatagctcagggttacagggtagatattcttcctcagacttctggcagaatctgccgcgcagaccagcgccccgatgcccatataggtggcaaaagcaaaaatcagaaatgcaggaagcgtaattccgttttttgacactgcctcccagaatcctcctgcaagaaacgcagtcagatacagcatgaccattgcttttgccagcagacttcccttcctgatgcagaaagcgatcctgagcataagaaaagcgcaggcgccgtgcagaaaaattcccatgagcagatttttctcaaaaggaagatatagaatcaggcaggaaaaaaaagctcccgccgcgcctcctgccagatatctccaccggtttgtcctgagtctcagaagtcttcctgtaatccgcagaacaatatagtccatcagaagattcgtcacaaagacaacatctatgtatatttctccatacataaaaaagccccctatgacctgtcattccctcactttggtaagtgagttcattataggttacagggggtgcgtaatttgtcaaaaccgggaaacagattcccataatttctcgttgaggttcgacataagccgagataattctgattaatcctctacgttctttttgtgaagagcattcatcatcatccgaagctcttccaccggaaactgtcccggcgcagacgcctttcctactgtggcaaaggttacggaagaaccgaaattttctcctgcaatgcggctcatggaacccagatttcccatggacatggcgatcacaggcttttctgtatactcttctgtgacctcgctggtcacctgcataagatcagcgacatcttcaaatctctgcggcatcactgccattttcagaatgtctgccccggatgcgtccatgtcgataaatcggtttttcagcgttttactgtcatccgttttttcaaaatcatgggttgaggcaatcactttcgctccggtcatctgaatcctgcggatcagctctgaaacattttcatgagaaaaatactctatatcgatcaggtctgcatttccgctttctgctgctgtcagtgtatatttttcatattccttttcagaaatttccgcatttccgccttctgaaacagtgcggatggtaaaaataagcggtatctctcccaatgcatttctaatctctctgagcatgtccggaaggctttcctcatgagaaagcccttcataaaagtcagctctccattccgccagatccgcttttatatccctgattctgcctgcctcctcaagcagcgctgaccggtcttttccggtcattggcacacatattttcggctgaccgcttccgatacgtacttctctgatctgaatttcttttgtcattgcccatcttcctttctgcttccatgaacagtaagaatatactgctcttttcatatggaaaaagactgctgattcctttttacggaatttcagcagtcctgttctttttattctgttacttcaacttttctgttctcgcggtttttgatctcttcttttacagaatcaataaactcattgagatcttttgctccttcatcgcccatgaaacggctgcggacagaaacttttccttcttcctcttcctttgcgcctaccacaagcatgtacggaatcttctgaagacgtgcctcacggatcttatatccgatcttttctgcacggtcgtcgatctctgtacggatacctgcatccttcagatcattcataaccttgtttgcataatccatatatttctcagagatcggaagaacttttacctgtacaggagcaagccatgttgggaatgcgcctgcaaaatgctcgatcagaataccgataaatctttcaatagaaccaaaagcaacacgatggatcatgatcggacgatgcttctcgccgtcagctccgatatattcacattcaaagcgcagcggaagctggaagtcaagctgaatagtaccgcactgccatgttcttccaatggaatcctccagatggaagtcgatcttcggaccatagaatgcgccgtcgccttcatttaccacatagtcaagtcccagatcgtcaagagctcctcttaagccctctgttgcgatctcccagtcctcatcgcttcccatggagtcctccggacgggtggacagctcaacatgatatttgaagccgaaaagctgatatacactgtcgatcagtctggcaacgcccttgatctcgtcacggatctgctccggtgtcataaagatatgagcatcatcctgagtaaagcagcgcacacgcatcaggccgtgaagctgaccggatttttcgtgacggtgaaccagtcccagctctcccattctcagaggaagatctctgtaggaacgtggttcagatttgtatacaagaatacctcccgggcagttcattggcttaatggcaaaatcagtctcgtcaattacagttgtatacatattttctttgtaatgatcccagtggcctgaagtctcccagagatggcggctcagcatgatcggtgtggaaatctccacatatcctgccttattatggatctctctccagtagtcaagcagagtatttttcagaaccataccctttggaaggaagaacgggaagcccggtccctcttctttcatcataaacaggccaagctcttttccaagctttctgtggtcacgttttttggcttcctccatacgggtgatgtactcttcaagatctgcctttttggtataggaggttccgtagattctggtaagcattttgttcttctcgctgcctctccagtaggctcctgcaaggctggtaagcttaaatgcttttaccggctttgttgtcatcagatgaggacctgcgcagagatccacaaactctccctgctgatagaagctgatctcagaatcttccggaagatcctcaataagctctaccttatacggttcatttttttctttaaaaaattcaatggcctctgctctcggttttgtaaatctggtaatggccaggttttcttttacgatttttttcatctcagcctcgatcttcggaagatcttctgctgtaatgggctcatcactgtcaatatcataatagaatccatcctcaatagacggtccaattgcaagcttcacctcagggaaaaggcgtttgatagcctgagccataatatgggaagtggtatgacggaatgctcctttgccgccttcactgtcaaaggtgaggatattcagctcacagtctctgtcaatcactgtacgaagatctgcaacctctccgtccacttcacctgcacatgctacgcgtgcaagaccttcactgatatcggaagcaatctcaataactgattttgcttcagcatactcttttgttgatccgtcttttaaagtaatgatcatgatttttctccttttctttttattttcaaccactgttacgggactttcttcgcttttatactattataaaagtcgattactccgtgccgctgtacgggactttttataataaaaaacgccccttacaatgcctgcgcactgtaagggacgagattctctgcccgtggttccaccctgattgccaaatcaccgggatttcttcatgaataaaataattccggggactcagcctcttttttgatgataacggtatcaccggaccggattaggatcactcagaggtggtcttcaactgattcctgttaaagcactttcaccaaatatgcttctctctgcaacagtccacagtctactcttctcgtcagcgtgttaaatctattcaactaagttctttttcattatagccactggatttccgtttgtcaacgtactttacacagatttttttacaaagctgatagccgcacaggccggacctacatgagtaccgataattccgcctaccggatacagccgataatttttcagtccgtatttttcaacggtatccttcataaacttttccccaagctcacggtctgaagtgtaaccaaaatacaccggctcgttttcatcaatctcataggattcaaattccttccagagatacttgatccctccgcttcttcctcttgcttttcccagcatggtcagggttttgtccttcagctctataacaggcttaatatgaagcatatttcccagaactgccagggctgccggtattcttccaccctttttcagataggtcagggtatccagcattccgcatacggtcacacgctttttcacatcttcaatggtttctacaatctctgaaacagtttttcctgcctctcgcatttccacagctctctgaaccagaaaacgctgagtaatgatcgcctgttctgaatctatgatatggatcctgtcatactcgctcatctgctttgccacattggccgcatttacagttccgctgaggccgctggaaagggtgataacaagaacctcttccgagttttcctttgcttcctcataaagagccagatattcctccggtgacggctggcttgtaacaggcagttctttttctgcggcaagcttttcaaaaaagcgtgtaaaatcctcttctgtctccaaaggaaaatcaccgtcagaaaattttgttttcagccagacaatacggatattcatttcctcagcttcctgtctggttatatcagaagcagagtccgttatgatcatcataatatgttttcctccttcagcggattgacaagtttccgctgtttctctaaaatatatgttacaaatgtatcagtggaacatactatatcatattccgtcgaaaaatcaatgaacctgcttataaatgaaacaaaacggaggaaattgtatcaatgggacgcaaaaaaaattccagtgactttctgaaagaatgcattgcagacgctctttttattctgctccgcacaaaatccatcgaatccattacagtccgggagatcacagagcttgccaatgtaagccgcatcacctactacagaaattttacttcaaaggaaaatgtcattgaatttaagctggacaaactgatgactgaatggatcgaaaaacagccccaaaaagaaagcgcttccgcccatgagctttccattcgttttttccagttcttttattctattcgggatattgtacagactctgatccgggcaaacctttcccttctgcttttaaatcgtctgatcctgaaattcaacgatatcaataccgcagacagcagcgaatactaccgtcagatttttatttcttttggtctgtgcggcatcattctctcatggatggacaccggaatgaaggaatccccagaagaaatgggacggatcatttcccgtaaattttttccggcgccggaatcagagctgtgaacagaacaggggcccggctcagtcacgcatatgaatgactgagccgggcccctgtatttattttgccgctttatcagctgtcaaaatttatttaaaatattctacaccggactcgaagattctgatatcctgctctccgtagatgtttacagccacaccattgtcacggcgctcactgtgagccatcttaccaagaacacgtccgtccggacttgtaataccctcgatattcatgtaagagccgtttacgttccattcctcggagctgctcagctcgccgtctgcagttacgtactgagtagcgatctgtccgtttgccagaagcttcgcaagccactcgtcatttgcaacaaaacgtccctctccgtgagatgcagggttgcagtaaactccgccaagctttgctttctgcagccatggggatttattgcttacaacctttgtgtaaaccatcttggaaatatggcgtccgatggtattataggtcagtgtcggtgaatctgctttctgtccgcagatctcgccgtaaggaacaagtcccagcttgatcagagcctggaaaccattgcagataccaagcgcaagaccgtctctctcattgagaagcttcataaccgcttctttgatctttgcattctggaaagcagttgcaaagaattttgcggagccgtccggctcatcgcctgctgagaagccgcccgggaacatgatcatctgtgcctggctgatagctttctcaaaaatttctactgaatcatggatatcggctgctgtcaggtttttaaataccttcacgtcaacctctgctccggctctttcaaaagcgcgggtactgtcatactcgcagtttgttcccgggaataccggaataaacacacggggctttgcaatcttatgattgcagatataaactctgtttgtatggaacagtccgttttcatcaacggttccctcttcatgatccttcgctgctgtaaaatatgcagtagctccgtcattttcaccggaatctgttttaaacactttttccagagttcctgtccatgccttcacagcctcttccagagaaatttcagcatttccgtaagagaacttcgcatcagcagtaacttcaccgatcactgtataggtaatggaaagacttcccactttgtcagccggaacctcaagtaccagatcgccaaatccgggagcaaagaaatctctcgggtcaagattgtgctcaatcttaacaccaaagccgtttccaaatgccatttttgcaactgcatcagccagtccgtgacggtcaagagcatatgcggaaagaacgcgtccctccttcatatcctcgtgaagttttccgtactggtccataatgccctcataatcaggaagctgatatgcatcctttggcgcacgaagccatacaagcctgcttcctgcttttttaaactccggagtcacaacatcctgaagctttccggtgtctactgcaaaggaaaccagtgtcggcggaacatcgatctcattaaaggaaccggacatactgtcctttcctccgatagacggaagaccgaatcccatctgtgccgcataagcgcccagaagtgctgcaaaaggctggctccagcgcttgggatcttctgtcatacgacggaaatattcctggaaggtaaagcggatctttctgtagtcaccgcctgtagccacgattcttgccacggattctgttactgcgtaagcagctccgtgatacgggctccaggaagaaagatatggatcaaaaccatagctcatcatggtcacagtgtttgtattacccttctgaacaggaacctttgctaccattgcctgagtttctgtcagctgatatttgccgccgtggggcataagtacgcttcccgctccgatggaaccgtcaaacatttccacaagccccttctgggagcatacgttaaggtcagaaagagtttccagccatttttcttttatgtccgctacttcctgacggtcagtaaggaggcatccttctttatttggaatttccacttcaactgtggtttcctgatgcgctccgtttgtatcaaggaaagcacgggaaatatttacgatttctttgtctctccaggtaagtacaagtctcggctcttctgtaacaacagcaaccggaactgcctccaggttttcttcatttgcaaatccaaggaacttgtctacatcttttggatcaacaacaactgccatacgctcctgagactcggaaatagcgatctctgttccgtcaagtcccgcatattttttcggaaccttatcaagattgattctgagacctgctgccagctcgccgatggcaacagacactccgccggcgccaaagtcattacatttcttgataatgcagcttacttcctctctgcggaacatacgctggatcttacgttctgtaggagcatttcctttctgtacctcagcgccgcacacttcaatagaagcctctgtatgcaccttggatgaaccggttgcaccgccgattccgtcgcggccggtacgtccgcccagaaggataatgatatctcccggatcagaattttcacggataacagcgcgtcttggagctgcgcccagaacagcgccgatctccatacgttttgccacatagtccggatgatagatttcttttacatagcctgttgcaagaccgatctggtttccataggaactgtatccatgagctgcgcttcttaccagtttcttctgaggaagcttgcccttcagagtttcttttacagaaactgtaggatctgcagcgcctgttacgcgcatcgcctgatatacataggttcttccggaaagcgggtcacggatggctccgccaaggcaggttgcagcaccgccaaacggctcgatctctgtcggatggttgtgtgtctcatttttaaagttgatcagccactcttcttctttgccgtcaacatctacaggaactacaatactgcaggcattgatctcgtcagattcctcctgatcctgaagctttccttcagatttcagttttttcattgccatcagggcaagatccatcagacagatgaatttgtcgtcacggtctttataaagaacctctctgtcgttcaggtactgctcatatgttttttcgataggctctttatagtcgccctcaccaaatttaacatctgtaagctcagtagaaaaggtagtatgacggcagtgatctgaccagtaggtatccagaacacgaatttctgtcatggaaggattgcggttctcttcccctttgaaataattctgaatatgctgaaaatctctgaatgtcattgcaagattaagagaatcgtacagatccttcagatcattttccgccatatccttaaagccgtcaaaaatctttacatcctccggctccggaaaaacatttaccagagtttccggtttctcaattcctgtttctctggaatctaccggattgatgcagtggtgttttacagcttcaaattcctcatccgttacggttccttcaattacataggtagtagcggaacggatgatcggctgtgaattttcatccagaaactgaacacactgtactgcagaatctgctctctggtcaaactgacccggcagatattctacagaaaaaattctggaatcctctgcggtttcaaagctttcctgataaagctcgtctaccggcggctctgcaaatactgtcctgcaggctttttcaaacacctcgtcagaaatattctccacatcataacgaatcagcactcttacacctgtaacagatttgattcccaggtaactgctgatttcatgtttcagttcttttgcctgaactgcataggcaggtttcttttctacataaacacgtcttacgttgctcatgagagactcctttctcgatccggccaggggccatagtatttttgagcttatattaattcttatcttataccggcatacagttatctgccgcttcaagataagtatttactacctgatggaattctcctttgtccgcataatctgcaaaagatgcctcgatgggcattttgccaagtaccggaactccaagttctgccgcaatctcatcaatatggctttcaccaaatactttgatctcctttccgcagtccggacattttacatagctgtaattctctacgatcccaagtaccggaatatgcatcatttcagccatattaaatgcttttttaacgatcatttttacaagatcctgcggagagcttacgatcacgattccgtcaaccggaagtgactggaatacagtaagcggtacgtcgccggttcccggaggcatgtctacaaacagataatccaggtctccccagatcacatcggtccagaactgttttaccatatttgcaaggatcggtcctctccagataacaggagtctcctctgtaggaagcaggaggtttacagaaataaccttgatcccgtttcctgtctccattgggtagattccattgtcgtctgcctgggcagcgcccttcagaccatacattttcggaatagacggaccggtaatatccgcgtccagaatacctactttaaaacctttggctgccatgcggtttgcaagagatgctgttacaaaagatttacctacgccgcccttgccgctgacaataccgatcacatgctttacatctgacatggaattggcttctaccataagatccatgtttttacccttgctgctgcatccctcgcagcttgatttgtcacaggttttgctgttacattcctttgccatcttacttctccttctatattattatcgtctatctgtgcagtaagattctccattatttgatgaaccggtctattgccttttccagttctttgatagcgtcccggtccccatgctccacagcgtctactatgcagtgctcaatgtggtcctggagaatgatcttgcctgtattgttaattgcggatttcactgctgaaagctgaatcagaacctcggaacagtcacgtccgtcttctaccattctcttaatagattccatatggccgattgctcttgaaagacgattaagtacagccttggtctgcgcatgactgtgatgatggccgtgcgctccgtgtgaatgttcaaccacacttccgtcctccatgatatgcacatgtgtctcttttgtttcgctcatgtgtgctcctttcccggccttaccggactgatctgcggtcctctttgttctgccgccacctgccattatagcacagctactaaatctctgtaaaggagcatctctgttttatccccgaggtgagaatatcaaaaatcactgttccgtcttcaagaactgtcttgtcataggaaacttcttttccctgaaatttattctttacatattcttccgggtcttccagctgcacctcatctacaaatacatcccgcatctgatttcccgggcatttgttaaaaatctcccagatcacttcgtattctttcatgatacgccttccctctcctgtattttttgcagttattttccctgtgtttttcccgacagataaaacgctgctcttctccctgctctttctgtttcagggattcttttctgttttttcgttctgttttctttttatattggctttttttcattgtaccagaccttttcaggcaatgcaacggaagtaagcataactttttgtgggtacttccacaatttttttgcaaaactttgtcgaaaagaattgaacttccgccgagaatagcgtatattagatgtaatttctaataagaatgtaattaaatcaaaggagagaagtcatgcagctcttaaaagaccgtatccttaaagacggaattgtaaaaccaggaaatattttaaaagtagacagttttctgaatcaccagatggatattactctgatcaatgaaatcggaaaagaattcaaaagacgtttttcagactgtccgatcacaaagattcttaccattgaggcctctggcatcggcattgcctgcatcgcagctcagtatttcgatgtacctgttatttttgccaaaaaggcgcagagtctgaatcttgacggggaaatgtactgctccaaagtggaatcctttacacataaaaaagtatatgatgtaatcctttccaaaaaattcctcggaccggaagaccatgttcttctgatcgatgatttccttgccaatggatgcgccctgatgggactgattgaaattgtaaaagaatcaggagccgttcttgaaggcgcgggaattgtaattgaaaagggattccagaacggcggtcagtgtatccgcgatatgggtgtgcgcctggaatcacttgccattattgattccatgaccgatgattctctgactttcagataaaaccgaaccttttccggattttcccggacaaatacacaacccggagctttgccatatatttacggtaaagctccgggctgttttattttcttatttatcgtcagaagcggatttacttttctttaaggttactttttccgacgctttcttttcatccttgtcagactctttttccttttttaaatcagaatcctctttttcccctgaagactgttttactgcttctttgtcttcttcccaatcggaagctgcactttcctgtggagtcgcttcgtcttctttcggagaaggagtaacgctttcctccgggactggtgttacggtttcctcagcctccggagctatctcttcttcctcataataaccgttgtcgatcagaagctcataattatcgccgtctattacctgcggctcacagaggtacgttccgatgatctttacaccattgtcatactgttcgtaatcgtttacctccggatcctcctctcctgtcaggtaaacgtgaaccatctgctcgcagttatctgccagatctctgtaatccataaagagactgaaaccgatttttccggatgccacggatctcactgcttcctccttacatcccactcctgtgatcaaaggccactgctcacttccgggaacaattcccgctgtctccagagtctcttcagcccccagagcggcatcatcaaaccctgtacagataatatccggaacagctccgtcttcataagaatcctcaaggagctggctcatccgtgtaccggcaagctctctgctccacctgatgattccggtatcgtcaaagctgatcttaccggaagtgcacaccagggttccgtcatccagataaggctgcagtccttccataactccattatacaggaacaaagcttctgtatcgtccggagaacccatcagaaattcaatggttctggtttccttttcttcctgcacttctttcaggttttcctttttaatgatctcttctgcgatcatctgtcctgcctgacggcctccgaaggtcgtataatatttcaccgcattggtatccataataagatcatcataggaaaataccgggatctctgcctcttttacttctgccagcacatccgtcagtccataagcgtctaccggagtgataataaaagcagctacctgctgttccagcatttcctgtatctgagatacctgtctggaagcgtctccctcagcataggccagtaaaggctcgtatccgtcctctttcagatttgcctcaagcacctgagcatcatctgaccattcttcctgatcaggaagaagaaccgcgatcttcacactttctgtctcagtttcctcctgagcctcttttttattttcggaatcctctgcttcggatttcttctcagtttcttttttatcttcttttgaagccttctccgcttccttttcggctttcttttcttccttctctttctgctcctgttcttcctcccgggcttcctgcatttcctcgtcttctccggttccctcatcctctgtctgggcactctcgctggcagcttctgtggcatcatttccgccgcatcctgacagagctcccaaagtcataaaaaatcctataaaaataactgctgtctttttcttcatgctggcttcctttctgttcagaattccttatattcttctgcaaaagtcttacgcttttctgctgaaacatccatgtataaaaagaaaggtgtcaaaagcagcctgctttcggcacccttccgtccggttacttagtcttccggtacaaattcatccttgcctactccgcagatcgggcaaacccaatcctccggaatatcttcaaatgctgtgcccggctcgattccgctgtccggatcgccgatttccgggtcatatacatatccacatggctcgcatacatacttctgcataattgttactcctttcaagtctgtttctgaatcttatgaaacggattctgtaccgctccacggcttcattataacgtcagttttttttgattgcaagtgttatttcacaaaccttttgtaaatataatcatttgcttccttttcctgggtgtcatccagcggttccagctgcagactctctccgtatttccgtctgagggcctgggtgatcagccagtctgcaagctgaggattcttgggaagaagaggtccgtgaagataggttccgatcacatttttgtagactacgccctcatatcctgtctgtccgtcatttcctgatccataaagaacctttccaagaggttgattatttccgataaaggttcttcctccatggttttcaaagccaaccaccggcatgtcaaataagtcgcttttgagaacaatattactgatcagccgtccctcctgctgttctgtgtgcatgtccacaagctcaagccctttgatcattccctggtctgttttataataatttcccagaagctgatagcctccgcagatagcgatcacaactccgttgttttccacatacgccttaaaagctccctgaagctctctgagcttttcacagaccagcatctgctccctgtctgaacctccgcccagaagcacgatatccaatccggaaaaatcaatggtatcattcagctcaaaggaaattgtctctgactcgatccctctccactgacaccgtttcataagacactggatatttcccctgtcaccatagagattcagcagatccggatataaatgtccaatagtcagtttcatttctgctctccctccagttttttcagtatatttctggtggcaaaaagtgccgtatagtttacaagtacatagagatttcctgtgccgtccttaactctgtctctgatggctttttccacatccggctccagtacagagggaatatccacatatttcagacgcagacgcatatcctgacagcggatcccgctgactgtaatgctcctgatactttctcctccgaaaaggtcaaaatccacatcccacagccaggaaatatcaattccgtcctgagcattgtcgttaatggcaatgatcacatcctttggcgccgtatcctgcatgacagcagaaatattctggttaaagcctgccggattcttggcaaggttcagggtcactcctgttccctgaatacggaactgttccatacggccgttttccggattgaattttttcagcatatctgtaaaatgctctgccgaaaagcctgccgtacgcacgcctgcataggccgccagaatattgtatacattataaaagcctttgtaattagctgaaataagcctgttttccacccggaaggaaagccggtctcccacctgtacatcctctgcgtcaaagtcaggttccggtcttttaaagccgcatttcgggcaggcataatcgccaagctgactgtaatggtaaaaactgtactgaagcttttctccgcattttttacagaaacggccctcacgtatctcattggtatcatttttcataacgggctggctgattccgtaaaatacacatggattaccgctgtccatggcaagatatgcggaaagtgcatcgtctccattgacgattaccttcatgtccggaactgtttttatcatagtttccagaatgttcatggtaatatcgatttctccataccggtccagctgatcccggaaaagatttgtcattaccatataatccggcctgatctccggaaaaatatactttgtggaagcttcatctgcctcaatacaggcatagtctgcatccatatggccgttgagctttgcgcccagaacaaaagctgccacaactccgttcagcatattggatcctgtatggttacagattactttctggccctctgcttccaaagctgcgcaaagcatattgttggtagtcgtttttccgtttgtaccgcagaccacaaaaatatcccttcgcacctctgatgccagctctctcagaacaggcggatagatcttcagtgcaatctttccggcccaggtaacgccctgtcttcccatttttttgcagataaaaccggcagcttttgccgcccatactgctgcaattcttcttatattcatgtatctggtatcctctgtattttttcttatcatgtcccctgtatccggatctatacacacaaaactggtttacatactcagttttttatctgatgtcccggctttttctgaaaatctcctgatgaatcctgcaaatcccatacagcattttccgactgtatatccacgagggatccgtctgaaaaattctcagttttgtcgtaaatcttacagaagcttctgtccggtcaggttcctgtgcttatgattgtacgatacttccatccatttatcaacagaaactttgttcgcagatgttcacaggtcgctgtcccgccaggtgttttggcatgtatatgacaaaatcctgaaatatgcgggataaagtatctgtgcagtatatttttatctaccagaaaagcagtacgttacgtactgagctttctggtaaaaaaaggagatacctgcctgagcagatatcccctttgagatactgaattatactaactcaataagtacttccattgcagcatcgcccttacgtggtccgatcttaacgattcttgtgtaaccgccgttacgtccaacgtattttggagcgatctcatcgaacattttcttaaccatgtcgatgtcttttgtgtttttctttctgccagcacctttagccggtacttcttttacaggatagaaaacttttgccatctgacgacgagcgtgaagtctggaaggagcatcttttgtgatctctttctgaacttcatcgtatacggttttcttcttaccgtctacaacttcttttactctcttgccttcagcgtctttgcgggcaacctttgcagttacagtaactgtctcaaagttgtctttctcgcgaacagccatagcaataagaccttctgcgatcttgcggatctcttttgcttttgcttcagttgtaacgatctttccgtgatacagaagatttgttacctggtttcttaacagagcttttctctgatcagatgttctgcttaattttctatattttgccatgttattttcctccatctgcgggacaccgggacatgcttgttcggtcttactgccctgatgctttggctccccgcggtaatattaataaaatgagtgtattctattcctctgtaggctgaagctgcaggcccagttccttcagctttgcaagtacctcttccagtgacttgcggccaaggttacgaaccttcatcatatcctcagatgttctgttgcacagctcttctacagtattgattccagcccgtttcaggcagttataggaacgaacagaaagctcaagctcatcaatgctcatttccagaactttttccttctcattgtcctctttctcgatcataacctcagcggtttttgcattctcagaaagatcaatgaacaggcttaaatgctcacttaatacttttgctgcaaggctgacagcctcatccggatcaagagtaccgtttgtgaacacatccagagtcagtttgtcataatctgtcacctgacctacacgggtgttttccacaaccatgtttactctgtcaaccggtgtgtaaattgcatctaccgcaatcacaccgataggcatatcatcagttttgcctttatcagcgcttacatatccacgtcctcttgtaatggtaagctccattgcaagtctgcagtccttaccaccattcagtgtggcgatgacctgatccggattcatgatctcaagatcctggtctgtctgaatatcagctgctgttacaacgccttttccttcacactcaatgtatgcggtttttggctcgttatcagagctgttatttttaattgcaagactcttcagattcataatgatctctgaaacgtcttctttcacacccggaatagaactgaattcatgcagtacgccatcaattttcacctggcttacagctgctcccgggagggaagacagcataattcttctgagcgaattgccaagagtagtaccataacctctttccagcggttccactacgaatctgccaaatttcttatcttcggatatttcggtaatttcgatttttggtttattaaaatcaaacactataaggctccctccttctggaaagctgcgtcatacttttaatatagtatccccaaactccgcctaagcttcgtttggggaccgcataaaagctcagttgcaccttaacctctatgctttacttagagtacagctcgacgataagcatctcgtctacaggtacatcaattacttctctgttcggaagttcttttacagttccggaaagagcatcctgatttacatcaagccactccggaacaagtcttccgcctgttacttccaggattcctttgtatctttcggaacctttgcatttttctttgatctcaacagtatctccggcttttacaaggtaagacggaatgtttacacatttgccgtttacaagtacgtgcttgtggtcaacgatctgacgagcctcacgtcttgttcttgcaaatcccatacggaagattacgttgtcaagtcttgtctcaagcataaccatcaggttctcacctgtctggcccggcattctgtcggcttttttgtagtagttacggaaaggtttctcaagaactccgtaaatgaattttgctttctgtttttctcttaactgtaaaccgtactcagagatctttctgtttgcacgttttaactgtcttgtagattttttatcaattcctaaatagattggatccagaccaagagatctgcatcttttcagaacgggcactctgtttactgccatttcaagctacctcctcaattagactcttctgcgttttggtggacggcatccgttgtgcggaaccggtgttacgtcacggatacttgttacttcaagaccgcatgcctgaagtgcacggattgcagcttcacgtcctgaacccggtccttttaccataacatcaacagtttttaatccatggattaaagcagcttttgttgcagtctctgctgccatctgtgctgcataaggagtagatttccttgaacctctaaatcccagaccgccggcacttgcccatgaaagagcgtttccttcgttgtcagtcagtgtaacaattgtattgttgaaagaagactgaatatgtgcctgtccatgttcaacgtttttcttgacacgacgttttgttgtcgttcttttggttgcttttgccattttaaaactaacctacgctttccttgaatgtaatattcttaagttacttttatcaattattctacttattatttcttcttgtttgctactgttctcttcggacctttgcgggttcttgcatttgtcttagtcttctgaccacgaaccggaagtcctttacgatgacggattcctctgtagcatccgatttcctgcagtctcttgatattaagagcgatttcacgacgaagatcaccttctaccatcattgtctcatcaatgacagcgctgattctctttacttcttcatctgtcagatctctgacacgtgtgtcaggatttacatttgcctgcgcaagaattttgtctgcgctcggtctgccgataccataaatataggtaaggccgatttcaatacgtttttctcttggtaagtctacaccagctatacgagccatgtactgtttcctccatcttcttttttgaaagcgcttctgtcgtataccacttaccggatggcaaggtgaaatggggcatacctgaaagtctgctttctgtttttagtttcctaattggggtgcctcggtaaaacacccagccgtctttggcgtaagacagcctttccgaaattgcagctaaatgctgctgttgcctctcggtattaggcaatacatgctttgataaatcaattatacaaacagtccgaacaacccttccgggtgtatcaaactgcagccgcacgtttcacaaactaccgtcattaaccctggcgctgtttgtgttttggattttcacagataactctgatagatccttttcttttaatgatcttgcatttctcgcagatcggctttacagatgatcttactttcactggaaatcctcctctcgtaatttaggcttgaatctgcagttatggacgcactcatagcgcgttcgcattatagtttagcatcaatgtataaagattgcaagtactttttttatttttttccaaaatcatatctgcaaaatgatatctgccacagccggataaatattcacaggtaaaatcccccacaatgtaaacaataacacagcagccaccttcccatttccatgttccggtgtctgctgtgtctccataaaacttcagttatttatttttccaaaaatacacaaacttctgtcttttataaactcttccgtaaatcacacacgatcaattactgcacggttcctgtattcccctggaaaatctgtgcgatcggggaatccggagaaaggatcactgttttgtcctcgcccttcatagagtttttcagagcatccaggctgcgtacaaaggaataaaaatcacttcttccttcttcgccataagcgccggcaaggatcttcatatattcctgctcaccctgggcttccaggatttccgcctgcttcttggcttctgaaatctgaatggcaacctctttgtccgtagtattgcggatcaccttggcctctgagcttccttcagccttataagtagccgctatattatctctttctgagatcattctctcataaacagcttccttattgtcatccggcagatccagctgcttggtatcaaaaagcattacctctattccgtactgctccatattgtcatctacagatcccattaccatatcagccagttctccgtcccggctggtgatcacctcgtcctgggacatactgctgatggcattttttgtcgcgttatatactgctgtattaatacggctttccccgttttctattgaagaattcagcgttctggcaaatttcagaggatctgaaattctccagatcacataactgtctgtaatcatagtctttttgtcccttgtgataacatctgaaggcgcaagatcatagagaagggtctgttttggcaatgttgccgttgtttccattaatggtacgcgaagactgatccccggcttatcaatcactctctgtacctttccgaactggcggatcagcttatattcattctgttttgtcactgtaactgatgtaagagctgcaaatacaactacaacacctgcagccacagcaagaacttttttacgtttcatgatcattcacctccctgtactgcagcgtctgtggtctgactctgagcattttccggctcagctccggtttccggctgctgtgtttccgctgcttcttcaccatcgctttcccctgtaaaagaatcaagcggaagaactttctgggttccgtctccattgtcaatgacgatcttcatatccggaagtacatcttccatggtctcataaaacatgcgaagctttgtcactgtaggattttttacatattcctcatacatggcgttaaatcttgccacttcagcttctgcctcattaattctgacctgcttctgagcctctgcatcctgaatgatctggtctgcctgagcctctgcctcgggaagcttttcatttctgtatttattggcgttattaacggcagtttctttgccctgctttgctgtttccacagccttaaaggctttcatgatctcctgtgtaggcggctccgcatcctggatcgtaatgttcacaagctggattcccacatcctgaacctccattttttccatgatcatttctttgatctttgcctgtatctcactttttcccgtagtcagcacatcgtctaccgtatagctggcaatcaccgtacggatacagctctgggcaatacttttcagaatttcttccggctgctgagacgtgtaaagatatttaaccggttctgtgatcctgtattccacaaaaaaatccacgtcgataaagttataatctgacgtgatcataatcccttcatctgccaccacgtcattggagtcctgatcatatccaataggaaatccctgtatggtagtgtttaccttatgtacctgctggatcagaggcagtttaaaatgaagtcctgtttctgtcactgctttcggcacaccaaaggttgacaaaaccgcctgctcctgctcctggatctgataggtacagtctgtggcaaacagacccacaacagcaaccccggccacgattgccacaacctttttggcatgctttccggtctttggtcttttaggagaccatttctttttcatgttgttaaattcctccatctgtgtcctccttactgcccaatctgatgaacatacaggtataccttaaactgaaatttcaatcatatgtccccgggcggtttattgaaagaaaagaaaaagactttcattccggacagattcattctgcctcaaaacaaaagtcttgctgcttacttcatatcgcggatatcttttactgataccgtactgacgcaaatatgtacctcatctgaaaaccattttattttcatccgatggccgctactcccttttctttgaacggtataatatcatattttacggctggttacaagtacaattttaatggaaacgtaaaatcagaatattatccaaaaaacgattttcatttttgtgcatttttccagttcaaaaagaatctcccacagcgtaccagtcatgcaaagcatctgatttccggggagattcttattttaatattccaggactaaaatttcagtccctgattattctgcttcctcaacattagcaagaacagctaacagagaaaagtcttccacttcaaactcaattgtctgtttttcgaaatcaacagctgcaggctcaatgatttcccaaatctttaactctttattataatataaaatattaacatctttcagagtatctttcagaatcgggatctgaatagtaacatcatatttgccgttggcattcttctctacagttacgccttcttctgcttccagggccataaagcctgttaagaaatcaagattcttttcttcgatttctttaattgttttttcaagtgctgcttttgcttcctcatcagttactgtttccagtacggcagataacttttcagtaaaagccttcatatcctttgttccttcatttacctctttgatcaggtctgccatttccttatcttcagtttccagagtggtaaatacttcatcttcttcaattttatctgttacgatatatttaccaacactgtcttctacaactactaccttgtctgtaatactaggacccgcccatgtggttgcagggctcatcagtacaactgcgcctaaaattccggctaaaattttgtttgtttttttcattgtcgtctctccttttaatataaatttttatagataatggcatgtctgctatttatcttctttgtaaaaaacagaatatattaaatcctgaagtccgtcctgatccacatgaaattcatcatagtaatcaccctgaaccccttcgcccggtactgtatgcgtcaccggaggatttttttcagtagctgtcagaaactttacaaaaatgtcatttcccatgtttgtgaccatataacttctgaggctgtcgtaaagccttgaaacaaatgaggcatctttctgatactcttcctgggcttttttcatatatgcctgcaaaaaacttttttgtctgttctgacgcaccagagcgctctgagtctggtcaatatcacgatagcgcacaaactgttctacattatcctttgtgagaacaacctctgcgccttctgtaaattcaggattcacttctgccaggctgttatccggaaccgtaacctccacgttaccggcaatttctgtcattacaggaattgcgtccatattaaccgcgcagtaactctgaatatgaattccgccaaacaggtcagaaaccgcatcctccatcagttcacagatttctctttttccatcgccctgggcaaactggagattgatatggttttccattttgccaagactttttcctccaacagtaaacacttctatctctgttatggtatcacggggaatggaaatcacatgaatctgttctgtcacccggtccatggacaccagaaagatcgcatccgcctgtccggtattatctgtttcctggttttccacctcacctctggtgtcaattcccataaaaaggaaattgctcagatggtcgttataagtataagtttttcccttatatgtaatgccgtcttcctgctgatccatggatacagaattttcggattttttcagatgcggagacgctgtctgctttttccatattcctgccccgaagactgccgccacgatcagcactgcgcatcctgtcagaatatatgcggctttcttttttcgatatcgacttcttttttttgtcagcatccttgtacactttctgttttatttgctgatgtaattcagttccaccatcttctcataaaccgcccgggccattgccgcctgcgcttcatatgtggaagaaggcgaagaggtgacagcagcaagacttatgtaatgttctttccatttttcacttaacgccgcgtccagagcagctgaatccacggaaccgtccaacggccgggttccaactataataaactgctcctggttggaaaatgttttcagaatatgctcctgctgctgcgcaagctcagccggatcatgattccagccgccataatatcccataaatataacagggatatagtccagatcgtcacgggtaaggtcttcttccgtaaaatcacggattcctgtttctgtaacataaagctgcgcgccattggctgctttctgatgctcagaaataaaattctgaatgatctgatcatcaaccccggctctcttcatcatagacagagtacctccgccctgaagagtcttattgactactggaatattataaccgttttcctgaagaagtttctgaagaactgtcatataggaatactgctgtgtatcctctgcagtcagcagatcgtctccccaacaggatatccctgctgttttttcctttacaggttccgaaggcacaggagaaagagtcggcgcaggggtcgctgtgacctccgcttcctgagccgccttctgctgaagttcttttgccgtttcttcctgttttttatctaatttctgtaaatcttccctgtcctctgctcttgtttcgtccgccagcttctccagcctttgtttatcttcccttgtctggtttctgttccatacaacaagccctcccagaatcagcacaagcactatacataacagagccagacatacatttataagcttaccatatcttctcaatttttgttctgatcctctttcattttttcataataggcggcatactttccactataacgagaataatacttgtcttttttcatatcaaccttgttgagaactgctccgagcgtcctgcagccgcttttttctatctggacaagtacttttttagctactttatggctgactgcttcgctttccacaaccagaactgctccgtcgcatttctgagcaactatggcggcatcaataattgtgccaagaggcggtgtatcaacaaaaatataatcgtaatgctctctcagttttttcataagagtggaaaaaatcccctccccaagaagagctgacggattgggaaccgaaggacctgcaaaaataatatccagattctcataattagttgaatataataaatccgcaattcctatctgtccgcttaaaaactgagataaacctgaaacactctctgccacgcgaaacctgagagcataagtagactttctcatatctgtatccaggagaagaaccctttttcctgacgctgccatttctcttgccagagaaaatgtaatatcgcttttcccttcgttagggtaacagcttgtaagtaagatcgtctttacatccttgccggcaaattttatatttgtcagcagtgttttaattgcctcttcataataataatccgttttacggacatcctgcattgaaactcttttcattattccggtatctcctttcactcagggtattacttttttcttctgttcttgttaatatagtcctttctatccggaacagaagccaaaaccggaacacccagatacttttccacatcatcctcagacttaatggtatcatccataactgtaagtacacagatgattcctccacagagaacaatgcctgcaagaaatccgatcagaatatttttggtcatgcttggagaggtctgcactgtgggaatctttcctttttcgatgatcttaggcggaacaacttccattttatctccaatatattcggaagaaacctccacaaccttatctgtgatctttttcgcaagttctccgtccgtatttactacagaaacttccagaattcttgtatctacagggttattgatcgtaatactcgctctgagagcctccgatgtcatctccaggtcaagcgcatcaataacatcctccattacacttgtacttttgatcagtacctgataatctgctgcaagctgtgaccccagctgcagatccgcaatagacgtaagagttgtctccttggacaagaccaggatactggctgtggaagtatatacaggatctattaaaaaagccgtatatgcgccatacagacagccacccagcaatcctactgcaataataagaaaaatctttctcttaattgcaaaaaatatttcccttaaatcaatcacatcatcatcgggaacatttcttttttcgtttgtttccatttttactccttctaatccttttcctgcttctgatttcataaaatattgcactgcgaaaacagtttcagcctattatcacattatttttcgttttatcacaagtactgccccttgtaaatccggaaaataccggaaatttatatacctaaaataaaatttatatatccctctcaaatttcttaaaattctcaatattgtggtatcttttttatcttccatttctttttcttatcttccagacgaaacgttttctttttattgaattgccccgatacttctgttatagtagtggacggtgcaggttttctgcacacttttcgggcgggggaaataaattatgaaaacttcagcagatcttggaaaagatcctgtatcttcactggtgctgcgtcttgccattccggcaatgatcgcccagtttgtcaatgttctgtacagtattattgaccgcatgtacatcggccatatcccgggtaccggcgccctggcgctggcaggagtgggcgtgtgcggtcccattgtgactcttctgtcatccttcggaactcttgtgggattaggcggttccattcttcttgggatccgaatgggcgagggcaatcttccgaaggccagacagattctgtcaaactcttttttgatgctgtgcggattttccgttatactgacagccggctttctttttatgaaagatcatcttctgatctggttcggggccagtgagatcactttcccatatgcagatacttatatgaccatttatactgccggaaccttttttgcattgatggcagccggtctgaattattttatcaactgtcagggattccctgttgccggaatgatgactgtgcttattggcgcagtttccaacatcatccttgaccctgtttttatctttttgttccatatggatgtagccggagcagccattgccactgttatctctcagatggcatcctgtgcctttgctctgctttttctgttcagcaaaaaagtccacgtacgcatttcctttggcaattacagcagaaaactgatgctgaatatcctttaccttggaatgtccccgtttctgattctggcaacagacagcattcttctgattgtcatgaacacagttcttcagaaatacggcggaccggaacagggagatatgctgatcacctgcgctaccattgtacaaagctatatgctgctgatcacttctcccatgatcggtatcagcggcggaacccaggcgatcatcagttataattacggcgcccgtcagactcagcgggtcaaaaaaacagtacgtacaaacctgaagctgatgcttctgtttaccacattcatgtttatcctttcccgttttattccgggaacctttgtccgccttttcacctccagtcaggaatacatggacttttctgtctggggaatcaaagtatttaccatgatgatcatccctttaagctttcagtatgtgtttgtagatgcactgactgccctggaacggaccaaaaccgctcttttcctttccatattaaggaagctgctttatgttgcaggaactattacccttccgctgtttttccaggcttctgcggcattctatgcggaaccactttcagatgccgtcagcgctgttatctcttccggagcctttctgctgatcattgacaggcatctgaagaaaagagaaacgacagtggcataatctctgccactttcatcctaatatcattcacacgagaggctcactcatcgattgtcctgataatcaacaagattctgtatttcctcatttacaattgtaaaaataaaatcgacatttttcatataggcactcataataaaaaaacaaaggagggtgcctattatggatcaattatcaaattttatatctgaatatctcaaaacatgtgaaacaataaaaaagctaaattcaaaaaccattaaagcataccgtatagacttatcacaatttcatacatttatgctgcagcaggaggatttcgcagaaaaagcaacattgaactcattcctgtcactgttacaccaaaaatacaaacccaaaacagccaaaaggaaaattgctaccttgaaagcatttttccattatcttgtttacgaagacttattatctcaaaatccttttgagaaactcaatgtgaaatttcgggagccacaagtcctgccccgaatagtgcctaccactgttatagaaatctttctccgaactatgtataaacaaaaaaggcttgcacatacaacatacaaatacaattcaatccttcgtgatatagccgtaatggaattactatttgcaactggggtacgtgtttctgaactatgctcactcactctttcccaaatagattttactacatacagaattattataaacggaaagggctcaaaagaacgtattttacaaattggtaatgaagatgtcaaagaaatactttccgaatattatacagcctttaaaacagatatttctaaaacagggtggttcttcatcaaccgtcttcacaaaagatattctgaagaatctgtccgaaacatgatcatcaaatatctgaaacttgcctctatagatatgcacgtaactccacatatgttccggcattcctttgcgacactgttattagagtctgatgttgatattcggtatatacagagaatgctgggacacagctctataaagacaaccgaaatatatacaaatgtgtctacttccaaacaaaacagcattctaactgccaaacacccacgtaactcaatgcatattaatattacaatgtaactccgagggccgcctaatttaagcggcctctttttctccctctctgtccattctaaaccagggataatatctaattatcttgtaatataaatttgattgtcaaacagagggggtaatatgaatacttataatttatgttttaagcaattaaatattcaacaaatagatgcgatagtacagtgtagagtgttagtgatttcatgagctgtcaccagattgctcacatcagttgacgctcacttgcttaactttctgtcaccagtcagttaggcaataccgcctgttttcaggcggtacctgctttatgaagttaccatcccaagcatctcgtgttccacaacgaacttgatcatataatcatcgatcaatcgtttctgattttgaaacgcatacatcagagctttttcacagacacggttgatcatccgtgggattcctgcagatgccttatggatctcatccaatgccttggttgtaaatatttcctgcccgcatccggagtaatccatgtggcttgcgatatattgttctgtttcagaacggtcaagatgaggcagcgtacagtacatgtcaatgcgctgccggatggcggcataccgctgtagctttagtttattttcccacagttctgtctgcccaactaaaacaagagccatgggactcatggaatcaaaccggtaattgagcaaaaagcggaattcttccagcgtctccttctctaacaggtgggcttcatccaggatgcagacaacctttttacgctgtacgccccggattacctcgatctcctgttgcagttggcgctttgaatcaccgcggtagaaacgggattccagccccaactgatccagcagacctttatagaaccaccttggggtcagttttgagtctgacagataaaggatgatgtaatcctcttttggaagttccgaataaaaccggcggataagcgttgactttccacaccctgaatcagctgttacaacagcaaacatctggcggtccgccacataagccagacggccgagagtttcccggaaagcattggattcgaacagtttttcaggagggacatcccggacaaacggtgtatgttccatgccaaagaatgattcatacattagtcattcgcctccttcctgtaagatgcaaatgaaatcgcatctgccatctggtacttactctgtgtatatttcgtttccagcgcatccagaaaacgggaagttgtcggcacttgtccctgcatggcagccggaagtgctgtctgcctgtcgcaatacggtccaatctttacaggacttgcctgaaaaggttcaaatccgggataggaaacggtgatgatctcaggatttgccggatcataggagatttccaccgtatatccgatcagggcaggtttggtttcatacctttgcccacggaaactgatacaggcacctttatccacttttcgctgctcatggtgcaggaaagcttcggctacaacggctgtatccaaaaaagtcagtggacggctgtcccggttccattcctgcagtggtgatatcccttcttccggaatggcggcaccgaggctttcgtagtattctgcaatgccatcatgctttttcttgtggtaatactcatccaggcagattgcccacaaacggttcagttcctccaatgttctgatatttttcagctttgattcccggataaaagcatctaccacctgatggaacttttcgattttccctttacttttgccggatcttggttttgcatacatcacacggatgcccagccttgcaagggaagaacggatctgttttgcgatatactgtgttccattatcaaagtaacaggaatcgaagattccataccgggaaatcgcttggtgaaacgtatcttcaatgattgattctccctgattgtcataaaaccgggatgataggagatacctggaatggtcatcgattgctgaggacaggtaagtctgtaccttagccccatttcttccgattggaagcttgggtccatacttgatgtccgcctggatcagcatcatacggtgcggtttgcaaaagcgtttggaagaactgtttcttgcatcctgatacatttgcatctgcttttgtccgtaaccagccttatagatatggcgttccaaagtagaacgctttaaagtaccgggtaccgcaagcccttccgtttccagaatgtagatgatctgggcaaccgaccgctccggaacctccttgcgaagttggattgcctgttccaacaggaacgaaaagttttccggaagtttttgtgaccggtgtttctcacggtcagcaggttttagccctgtaaactgcctttccgaaaaagctttttcatagcggtaaagggaacggacagatatgttgttttcctctgcaatctttttgcgaagctggatacgctttgcatcatccagaccagtctggagaagcggtgaaatcaattgaaaacgcctgagggcttcttcctcttgccattgttgtctgtttattgttgtattcataagataatgacctccttttgagaccaatataccctttggtactttgacagacgatgcaaagtaggtgcataagccttaccagcggatcgggactaaaaatcctccgctgttgtaaatctggcgtaagatgatttccaaccagttttgatattgattcctgaaaaaatcgagcagtgaaccaggggaaatcctctcttcattataacccagcaggaactcccggatcgtccttaaatatccgttgatacgttcaagattttcgcagaaccattgcagccagcggagcatggtagcgcaggacgggtagtcttcagaatctaagtcttccggctgtacaacgccatccagcaccccggagatcacttctgtttcgtaatgcttgtacggaacaagacaatccggaagttcattatgataagagtggcagttcttacaataaaaccgccggatgatcaactgatcttttaaaccgccttcctttctacggatgcgtgggcgtgaatcccggtaacgaagcgtagcctgacagatggggcacatatgggtggtcacactgctctcaacaaaaaacaccaaaatcctccttgaggacaagtgaataatctgatataataaccatggtttagtgaccagggtctcagagtacacaacttgccaggagggtgctctgagaccttttcctttttgtatgctgatgacagtatacaggtcaattcagagacaggcaagtaaatcagtattttgataatttatgaggtcaacaacagtagagattcactgatagaatcctcttttcttagagagacatttgtgaaacctgatacagactatttagaatatattcttcttggtgctggaataatgattggagttttttacgataatactctattaggttttgcttcatatgttacaccaagcaaagcaaaaactgatctaacaaaatttattacgaaaaacaaaaataatatcattcaatttgaacatggaattatagctccgaaatggcaaggaaatggttatttatatatgcttttacagcacctaaacaaatatagtttagaacaaaattataatgccattattagtactgtccatccaagtaattttccaagcttgaaaacagcctttaaaattcatcaaagtgctataaatttagatttttactatggtaatgagcttcgatttataatatatggcaatattttacatgataaaatcacaactcagagtcctgattatctttctttaccctatgcagatttaaagggaatctcggattttttgaataagggttacgaaatttatgatataactcccaaaatgagaacttatttattacggaggtacaatgaaaatacctgtaaattatgattctaacatagggaatattattaatccaactttaagatcacaaaagttttttatttctgattgggacttacataatccccaattttataatattcctagttgttttacaaatccgactaacttgtcggaagaaattcctgcaattaagcaatattattttgttaatgaaatggaaatctataaaagatattttgctaaaaatcagaaattaccagaagaaattgctaaaaatatttcaatatttccaaatggaactgtagcagcatatttgattttagaattattattcgaaaaaggaacactaaactccttattattatctcctacttattttacttatattgatatgctaaagaaattacatggaaacatttattattatcaggtattggatgataatggaaatttgaaatttgatattgcgtaagtaggtaatcattcgtatattgacattttataaaagccatctgatactgctcctggctgtctgccagattctctatcagatggcttattattatttttttagtttagtacggcagtattccggaagattctctgaccatggaagcagtttctttaattcttcctctttaggaaaagcccccatttttctgagttcatccaatatataagtcagatatgcgtatggtttcagatggttcagaagtgccgtttctgtaatgctgtaaacaagggcactggcatctgctccccgtacacttttggcaaacagccagttgcggcgtcctactgcaaagtttttcaatgcacgttctgcactgttgttgtctatgctgagatgaccatcttccagataccgtctcagatatacttcctgattaagcgtatacaaaatggcatcaccaataagggaagacctgtctacagaatcttccatcgtatgcagccattcaaacatggcatccataaccggacgggactgtttctggcgctcctcatatttttcttccggtgttttgtcatggagcatctcctcaatcttatagagaatcccgatccttgacattgcctgatatgcaactgtctctttcagctgttcttttgtgaagtcttttttcaatgctgtgagggctgcatcaaagcgccgtcttgcatgggtaaggcatccgcttattatgataccttctcctaaactgtgataagcctgatatccatcacaggtcagatacccatgaaacctgttccctaaaaagtttacaggatgatatcccgcacgggtcctttcataatcgaagagtaccatctgcggggagccactgaactcatccgtgaggtatacccacatccagttctgggtcgtacctttctgctctggttctccaagtacctggatacggctttcatcacaatggatatatctgctttccagaagttcttctttcatcagctgatacagtggtttcaggtatctgtctgcacagtttatgatccagtttgccatagtctttgtggaaagatcaagatcatatctggcaaactctctttcctggcgtgccagaggcatcccatttacatatttagcgttcatgataccggcgacaagggaaacctttttcagatccggctcctgaggtggctggatgccttttcggaaatgtatcatttcctataccagtgaacgcatttccctgttccaggtccgttccggttcgttctctatactgtctttcaggtaacgcagtacatgggcaagacattcctgatgatctgacccataatgataaaaggtcttgtcatgatcgtggataaggattccctgataatcctccgtgacagtaccttttaccccgttatgtccttttttctcgcgggcaaaatacagcgcttttccatccggtgtcgcgcaaacatatacctggcagctctttccgttttccctggcagtggtacaatctgtatgcataacgggagaaagcagcatatctgcataggcagacctgcgttcaggctcagtttttaaagcaaactccttaccgagtttacttaccattcctttcgatatatttaactttccaccagtcaggtctgacaggaatttcctgctcttatcaatagaagtacaacagtcattatttaaaaggaacaggaacgcccgaatgttgccatcataattcacatcatcaataacgccgtccggaaaggcagcatgtacacgttctcctgtctggctgttataataaacatctgcatggtattcttttacatccaggaccatacggatgcttaccagttgttttacgatggtctttgcagtctttttaaaaaagcggtcttcaaggacttcttcccgcggtggaagaagtattactggttgtgttggctcctgtttctttcgtctatgtcctttatgaccgggttgacctcccggctttctgcctgttttttccctgctgtttgtgatttttttatgcttgatggttttcgaggaaggaatcgatgaattttcataatcccggtttatctgtgcacggagtttcaggtttttccccagttcttcctccagtttggaagctgtctcataaaatttaacctggagttcttttaccttatccaatgcatcctctctttgtttttcggcaaaaagagcacgcttctccatttctcgaagtttttgatctgcttttttctgcatagcttcaaactctaaaagcatgtcttccaaaacctgaaaccagtagttacgtacgcggattgtttctttatgtgcatccgtcactgcagtctccagcgtccggatcttatgttcataagttctgcaatccttttgatggagttctttcagctggatatatttttcaccggattcaagttctttatttctggcctgtgcagctttcagccggcacataagtgtgatgtaatcataggtgtcaggcatacattttcctccagcacatttataatcaaacgccgctgattatatctgtgatctttgaaatatgatcttctaggtattcgatcaattctttctgcttttggataaattcctcctggatctcaatctgtttgagataaccagcaagaagttcatcacgttttctaagctcttcaattaaatccatgtccatgaacctctttcctttttcgttaaaaagagtataacaaaaatacactcaaaaagcgaatcacctgaaattacactttcgtcaaattgactgtggataaagagtctttttgtaactggaaatgctttaatatgagtgtttaaacaacacgaacagcagataaaatttaaattttggtgtataactttctcccaaaagaatagcaggaaaaactataaacacagtttttcctgcctaaaacaattatccacaaaataaaaaaataaatttcgtcattttttacaatgacttatgctaacccttgaacagtaacattttatctgcagatatattcccctcaagcagtgggcttttgatgattcccactccccaaagtaccaaaagtttaaaatcgatgaactccctctgatcacggacttccgtcaggactggacttacaaagaactcattccttactacgaaaaacgttatggtaagaaaatccgtccgatcagccgccggtcagaatgtgacatccctgactcctgtacctgcccgcgttgtgatgccccaaaactgttcctctacaagaataacggttccaaaggacagctcatgtgcaagatctgtgattccaggttctcacccgatgaaagcagattttcttccgtaaagctacgctgccctcactgtggcaataccctggttcctaaaaaggacagaaaacacttcattgtccataagtgcgttaatcccaaatgtccgtattacctccacaatctcaagaaagttgacaaagcagacctcgcagaggattatggcaaaaacaaatatcagcttcactatatctaccgtgagttcacgatggattttttcagcatggatttaaataccctgcctaaaaatgcttcttcacttaaattcaataagcacaattcccatgtcatgtccttatgcctgacgctccacgtcaatctgggactttccctgcgaaagacatcacaggctttaaaagacctgtataacatcagcatttcccatcagcagatcgccaactactgtaaaaccgctgcgatctgtatcaagccattcgttgaccagtatccttacgagaaaaataatgtcttcactgctgacgaaacttacataaagatccgtggtatcaaaacttacgtctggctgatcatgaatgcagccacacgttccatcctcggctatcaggtctccgacaaccgtggtgttggcccctgcatccttgccatgcgtatggctttccatgggcttgcaaaactcccaaaaaattttaaattcattgcggatggttacagtgcttatcctcttgcttcaatggaattcgcaaagaagtttggcaaagactttacattcacagttacccaggtcattggacttaccaacgacgatgctgtctctacagaacatcgtccattcaaacagatgattgaacgactgaaccgtacttataaagcttcttaccgccatacaaatgggttcgacaacatcgacggtgccaactatgatctggcgctctgggtcgcttactataatttcctgcgtccacataagcatgcaggctataaagtcctcaatgaagtagaaatgcttcagggtgtcgacaatatgcctggcaagtggcagcttctgatctttcttggacaacagaccattctgaacatacagaaaaatggtactactgcatcggagcggaactgttgtcaatagaaccgtggaataccggaacagacggctttgccggctgcgaggatatgccgcaaaagtttattgacataaagttctcggattatcctatccagcagaaaaggggcaactgcgcccttttcctgccttccggcgaggatgggctcgggcaaagcccgataatggatcaagggactggtcccttgtaggttcttagggcacccccctaagccctcggagagcttattggaattaatatctgcaattttcaaggttcatcagagcctttttctttgactctgtttttcataaatcatttgacactacctttaatataaaataaaggcttttcagccgtgaaacaacattataaaattactctaccgtaacactctttgctagatttctcggtttgtctacatccaatcccttggcaacggacacataatatcccaataattgcaaaggtatcacagctaggctaccgataaaatgttcgtccatctttggaacatagaccgtgaagttcacctgatcttcgatttcatacttgccataagtagtgagccccatcagataagcgccacggctcttgcattccaacatattgctgattgtcttttcgtagagttcgttctgggtcagcacaccgatgaccagtgttccctgctcaatcaggctaatggttccgtgcttcagttcgccagcagcgtatgcttcagagtgtatgtagctgatttctttcagcttcaagctaccttccaagccgaccgcataatcgatgccacgccccacgaagaaaacatcatgagaattggcatactttgctgcaaaccactggatgcgctctttatcttccagagctttctgcatcttctctgggagagtcaacagttcagaaatatagtagctgtactgctcctccgtgatttttcctctgacctttgcaaactgaactgccagacagtacatggctgctagctgtgcgctgtatgccttggtcgttgcaacagagatctcagggccagcaagtgtgtagaacaccttatctgcttcacgggcaatgctactaccgacaacattaacgattgccattgtgattatgcctttttcttttgccaaccgcagtgccgccaacgtatctgccgtctcaccagactggctgacaacaatcaccagtgccttctgattgagcggcatcttacgatagcgaaactcagatgcaagttccacacgcaccgggatatccactatatcttctaacacatactgagcagccatgcccacatgccatgcagacccacaggcaacaatatagatctgctcgaagtttttgatctcatcctcagtgatttccacactggacaggtcgatggcaccgtccttgatgacagagttcaaggtatcttgaactgctttcggttgctcatggatctctttcatcatgaaatgctcaaagccgcccttttccgccgcctctgcgtcccacttaatctctgtcgtctgcttctcgatttcatcaccgttcaaatcgtagaagtgagcttcacccggaacgagccttgcgaactcaagattgccgatgtagtacacattgcgagtgtatttcagaattgcagggacatccgaagctacataggtttcgccatccgcaataccaatgatcatcgggctatccttgcgcgccacccaaatctcacccggataatcccggaacatcagttcaagagcgtaggagccacggacacgtaccatcgtcttagcaatggcatcgataggaccaagattgtactttttataatagtagtccaccagcttgatgactacttcagtatccgtctgactatagaacgtatagccatgcttcaacagcttttctttcagttcagtatagttctcgataatgccgttatgtacgccaacgacctcagactccactgtaccagaaccagaacgggtacagttacctgaaacatgcggatgtgcattggtttggctcggctcaccgtgagttgcccaacgagtatgaccaataccacaggttccttttaacgccttacctccatctgttttctcgatcagattggacaagcgccccttcgctttcacgacctgtgccagttcttcgccatcacggacagctaaccctgccgagtcatatcctctatattccagttttgacagaccgtccaaaagaatcggtgctgcttgcctttttcctataaaaccaacgattccacacataggcttattcctcccattgcttacttctctactctattatgcttttcctctatgtaaagcggtttcgattaattccagctccattcctggctttacaccttatatcccttttcgctgattgccttgacaacttcatcaacatacttccggcaggtatcgtggtcaggggcttccaccatcacgcggacaagcggctcggtaccggactcacgcaccagaatacgaccagtgtcgcccagtgcttccgcaaccgccttgacagcctcctgcactgccggatcgttctgtgcagcctttttatcggtcacgcaaacattttccagcacctgcggatagatcttcaaaggttcagccagcttgctcataggcatcttcctggccagcatgacctccatcatcttcagaccggtcaggataccatcgccagtgcttgcgtacttagagaagataatgtggccgctctgctcaccaccgatacggcagccgctctttgccatatactcgtaaacatacttgtcgcccacagcggtcttggcataaccgattccctgctcatcgaaggccttgtagaggccaaagttggacatgaccgtagtgaccaccgtattattcatcagctcaccgttctctttcatgtagcagccgtagatgtacaggatatggtcaccggtgatgacattgcccttttcatctacacacaggcagcggtctgcatcgccgtcaaaggcaaaaccgatatctaaccccttctccaccacgaacttctgcagaccctcgatatgcgtagagccagcgttattgttgatattcagaccgttcggcttattgttgatgacgtaggtgtctgcgcccagtgcatcgaaaatgctcttagcaatattccagcttgcaccgttggcacagtccaggccgaccttgacacccttgaaagaatagatgcccagagagatcaaatagcccatataacggttgcggcctgccacatagtccaccgtgcagccgatatgctcacgatgggcaaagggcaactccgaccattccttatcaaagacgtggagcttgccgtcaatgtagtcctccaccagcgtcaaagtctcctcggacattttctcgccgtagcagtcgatcagcttgatgccgttgtcgtagtaggggttgtggctggcagagatcatgattccgcagtcgaaatcatccacgcgagcaatataagccacagacggggtggtcgtgacatggagcaggtaagcgtctgcgccggaagccgtcagaccagccaccaggctgtactcaaacatgtaagagctgcgacgagtgtccttgccgatgacgatacgggcgggctcgttgtcgccgccgttacgctcacgcagagcgttgtaataccagcctaagaaacggccaaccttgtaggcatggtcagcggttagagtgattccagcttcaccacggaagccatcggttccaaaatactttcccattttattgctcctcaatataattctttacacatgtacattttagcgaacctctttgtaacacactcagctaagtattgcttcttgctatcgtattctcttactcctcaactttacttcatagcacaacaacaagcctgtatacagattgcagtgacaatctatacgcaggcttgtcctcgtacctccttattttgttttctgctctatcagctttcgctgtggtgggttaagtatagagcgcaaccagaagccattaacccctgaaaacacgctggccataacgcaccatgacaagcagaaacaagttgaggtaaaaaggtcaagccgcgcaaacccgcatgaaatcaggcttttctctggttgtccatattatttcacactccccaccaaggatcggcggctgggaaatagagaacacatagtccatcttgccaaccttgaaggtcgcacccattgctccaaagaaataggaaacaatgttcttcacacggctcttcttattggtcttgctgaactccggcacacggattctcagcactttcacgccgttgatttcttcttcgtaatatttctgtgtcttatatttatcttcaatggttcctaaatagcttggaaccacacaaattatcgtaatatcaaacttatccaacatgccttctgcgagttcacggagaatctgacctgtggatgcagtatcaggtatgtagtaatgtgcataaatcagcagtttctttttttccatcctgcatctcccctctgtgtacttctctactcacactattagtcacgctggaaaatatcgcgtgtataaaccttatccttcacatcatcaaggcacatgtcataacggtttgcaataatagcatggctcatttccttgaacttcgccagatcattgactaccgtgctgccaaagaaagtagcaccatctttcagagtcggctcataaataatcacagttgcgccctttgccttcacacgcttcataacaccctgaatggagctctggcggaagttatcggaatttgacttcatagtcagacggtatacgccgatagtcacagacttttcctgctgcgcattgtactcattgtcctcgtcatagccataataaccagccagcttcaggacgcgatctgcgatgaagtcttttcttgtacggttgctctcaacaatcgcttcaatcaggttttccggcacgtcggcatagtttgccagcagctgcttcgtatctttcggcagacagtaaccgccatagccgaaggacgggttgttataatggctgccgatacgaggatcaaggcaaacaccgtcaatgatctgctgggtattcagccccttgctttctgcataggtatccagctcattgaagtaggccacacgcagagccagataagtattagcaaacagcttgactgcctcagcctcggtgaagcccatgatcagcgtgtcgatgttctccttgatagcaccttcctgcagcagacctgcaaactcatgtgctgcctctaccagccgctcattgttcggatcagtaccgacaatgatacgggaaggatacaggttgtcgtaaagagccttggattcccgcaggaactccgggctgaaaatgatattcttgctgttgaacttttctctcacacttgccgtgtagcccacaggaatcgttgacttgattaccatgatggcgttcggattgtactccatgaccagcttgatcacagcctcgacagcagatgtgtcgaagtgctgcgtgtgactgtcgtagtttgtcggagccgcgattacaacaaaatctgcatctgaatatgcagtctttgcatccaaggttgcagtcagatccaaatccttttccgccagatatttttcaatataatcatcctgaatcggtgacttccggttatttatcatctcaattttttccggaacaatatccactgcaacaactttatgatgttgtgaaagcaaagttgcaattgacaatcccacataaccagttccagctacagcaattttgtatttcttcataatacttctccttttgttctcgttgcaccaatcctctaaataataatttttatttatattctaatctcttaaagaacagatacacttctttgattttctcctacgcatgtttatcatactaacaaatcaactgataatcaataaggtatttattacaatcaaatgtttttctttactgtcagtacttcagtcttatttttaataccacaaatttattttacttccaccaagcttctacttaatatactcagaatattaccccatcagtcaaagtattcatttatacattcctgtctctcctaagcatatatcattttttagtagattactgtcttattgtacatttagcatacttcttaccacaaaaattcactttcccacatatctacaccggaatcctggaacacgttcctgagtcttctccttaaatgctcttttgtgacaccttttttcaggataacttgcaggaatccgccttcgccggatcctgagataaactttccatcaatgagatcttcacaggattcaaaaatctgatcaatacatgtgttagttgatcctgcatccagtttcttcgatacctcccagtgccggttcagcagttttgcaaattcatcaatccgcccctgttccagttcataccgcatcaaaactgccagatgtttcatttcttccaatgcttcaatggattccggacgtccgccgatatatccgccaactacatatctcagaagatttctggcaaggcgtctctgtccggtataaatcagtgcaaaccgttcctgaagctctgcttttgttgcttcatccagttctatgtgttctactttaatttcctgtttcatccctggctttgttgtaatgtatttcactcctggagtcaggcctcctacctgatcctgccagccgccgcctgtactcatgatctgttccagattcaacactcgctgatacagaacactgtcggaccagtcttctcctaaaaattcaccaatcgccttgacagcagctccttcaagaatactgctggttcccaacccggagcctttcggtacattacaaacccgggtggaaatataaattccgcctcccagacgtcttaaaatatcctgaagattcacactgccgtgctgcgggataataccacaggcaatcagtgctgccttatgtaatgcaaaggaattataacatgccatctttaaatcgggagggaactcctgccattcctatcagaaattcgtcaaataaagttgagggccgtccatcgggaagttcccgtggaacaggagaaaataattttccacatactgaatactgcggcactcttttgctgtctcctcctgaatgaatcaccagaactcgtttaccatggaaattcccgccaaaaccttcctgttcagaaaggacacgaagtacctgtaaatttgctcctcctgatccgatcctcttcccgtcaggatccgaaatcaccagaaactttgtatttttaggtaaaactcccctttcctgtctgtacctgatctgacattcaaacgcttctgcctgcgcttcattagaagcggtcagcactacatagtcccactgagtatagcttgttttccggatacttctcatgtagtcttcccaggcatccaggtagctctgtctcaaaaaaaagatttttcagtcttctgtatttctgcatatttttcatcattctgctccttcaatttacaaatacagggatttccggtacatcagtctcttttaatcattaatgtttttttcctgtaaaatcataattacatcacatagatccatctctctttaagacagcagcaaccgtcttaaacaggatcctgaaatccagtcccatgctccagtttcttatatattctgtatccagctttactacttcttcaaagtcagtgatatcgcttctgccgctgacctgccacattccggtaattcccggtttcatggcgattcttgctttgtgatgatattcatactcttcatactcggattttaacgccggacggaagcctaccaacgacatctgtccaagaagcacattaaggaactgcggaaactcatccagtgacgtggatcggatgaactgaccgatcccggtcttttttgtgccgtccggaaggaccttgtttccgatgattctcggatcaaagtccagcttaaacatcagattgctgctcattttattttctttcatcagttcagctttccgctcttccgcgtccatatacatgcttcggaatttgtacatcttaaatatcttaccattctgtcctacacgttcctgactgaaaaaaatcggtcccggtgaacttatatataatgggtgctacaaacacaaaaatgatccctgtggcaatacatcccgccagacctgcagcaatatccatggttctctttaaaaaggcctgtctcatggtcatatagttaatactcgtggtcagcactgtgtattctccgacttttccaatggattgtttgcctaatgtgctgtttgtaatctttacaagattcaaatgcactgtaagtcccatttcagagcatctttctattaattcctttgggtacgggatactttcatccagatttataaatacttcgtctacccagctctgacgcagaaattctgctacattttctgcatttgcaacaacgggaacgccctcaatatcctctcctgtcatatcccggtccagaactataacgccattcatctgatacatttcatagttatgatttttaatgctctttactactttttcggcaatcttactggaagtaatgataatcagagaactgtcgccgcctgttttcattttctttttcagatagcgtttccacaaaatacgtgcgccgtaggcaaagacagcataaaaaatgcccattaaataaaacgcagttctggaatacatatttccttcctgtacgctgagcaaatacaggcttcccaccagtatcagcatcactgcctgttttatggaagaaacaagttctatgtaatatcctctttttaatacattcttataggactcaaacagaaatataacagctatatctgccagttctataaagattgccatatttcgatatattggtacactgtagggattccattctcccatccgacacacataggaaaaatagaatgcaagctgaatacacagtaagtccaataagataaagtcaacatgttttacccaaccacttgaatttttccgatacattgatatcctccaacctcaaacttaatatttttcttttcgtttttccgttgccatgaagctgatcaaaaaccagacgcttcatcccgctgcaaaagttctgaatacgctaaatagcctgtaaatggtcttcttctaacatttgcaggctgaatatgatattttcaacagtattggatgcttattgcaaattgtgtgtggatgttttatcatatccaataaaactttattcagtttagcagtaactttcccgttcatagttccacaaagcacttgcattttgcccccccccccacaaaaatccgggaacgcaaaaaactgcctgttttcaggcgcagtcatatatttctgtgaatttttcatatttctccttccagcttctccttatcacataaattgtaataattatgcagtctgtttttcctgccacagaaaaagcttctgccgtaaagctgatacgctgtcacaaaacctgtaatatattatatattttaacatagcatatcttgtatgtaaagttgaaaaaaagactgaattggtctaaatctatgcctcctttatgacagatatcaacaatttcatactaaaatcatctgattttaacataaatttcctctttctttatttctgaaaaatcagtaaaatacattcttacggaacatttattatctgcggaaaacagactgcataatacagtttttcccgataaatacaaaaagcacaggaatctgatataattcctgtgcctcaagtaatatctttattgctgctctcggaaagagactttttatttatctctccagataattctgcccttggacagatcatacggagaaagctcgattgttactttatctcccggaaggatacggataaaattcatacgaagcttaccgctgatatgagcgagaaccacatgtttgttctccagctctaccttaaacattgcgtttggaagcttctccagtacagttccttctacttcaatcacatctgcttttgacatccttaacctcctgtgtcatctgtcattttgtaagagtcagaatttccggttcgccgtctgtgatcagaacggtgttttcataatgagcggaaagagatccgtccattgtgacaactgtccagtcatcgtcctcccaggccacgtctgcgcggccaatattgatcatcggttcaattgccagagtcatgcccggcatcagcttgatcccacggcgcttctgaggaaagtttggtatctggggatcctcatgaagatgagttccgattccgtgtccaaccagatcacgcacaataccataattatattttgctgcataagctccgattgccttggaaatatcattcagatgatttcctgcctttgcaaatttaatgccctcaaagaagctctgctttgttacttccataagctgacgggcttccggagaaacttctcctactgcataggtacgggctgcatcagaatgatatccctgatagatcagtcccgcgtcgatctttacaagatctccctcctgaatgattttctttttggacgggattccgtgtaccacttcatcattgatgctgatacagaaggatcccggaaatccgttataattcagaaaattcggagtacagcccagagagcggatcatttcctctccgatacggtccagttccttggtgctgattcccggtctgatatgagcagccagttcattgtggaccttttccagtaaatgaccggcatgtctcataagctctatttcatgttctgacttaattgaaactgacattttttattctcctaaaactcccacgatttcctggaatacttcatccagagaacgtgttccgtctactgtttttaatacaccctgctctgtatagtaatcgatcagaggctgtgtctgctcgtggtatacgttcagacgcttctgaacagtttccggctggtcatcgtcacgaagaaccagtttctctccgcaggtatcgcatacgccttctgtcttcggagccgcataaacaagatgataggtagctccgcatttcaggcaggcgcgtcttccgcccatacggtttacgatgttttcatccggaacatccacatcaatggcaaagtcgatcttgcttcccagtttctcaagagcctctgtcagacattctgcctgaggaatggttctcggaaaaccgtcaagaacatagccgttctttgcatcatcctgctggattctgtctactacaagatcacaggtcagttcatcaggtacaagaagcccctgatccatataggtttttgcttttttgccaagctccgtgccgtttttgatgtttgcacggaaaatgtctcctgtggaaatatggggaattccatatttctcagcaattttttttgcctgagttccttttccggcacccggcgcacccagcataataatcctcataatcataccctccttatattccaggacaaacaggcagcaataaggcgctgtcctgatttatccctgataacttaaaatggctgcagcatgcagaagcacaccgcaaccttcatttcctgtgcacaacttcattgctgacaataaatttgcgcactagttagccagaaagcctttatagttgcggacaagcaactgagattcaatctgtttcacagtctcaaggacaacacctacaacgataataagtgaggttcctccaaaggaaacctgagccttaaagataccgttaaagaagaacggaataactgccacgatgatcaggccaactgcgcctataaatataatgtaagtcaggagtttctccagataatcggatgttggtttacccggacggatacccggaataaagccgccctgtttcttgatattatctgcaacttccagtggattaaaggtaatggaagtatagaaatatgcaaagaatacacagagaacaatatatacgatcaggccccagctgtatttcagctgagacggatcacaccagttactggaagacagccccttcaaaatttcacttccgattcctgtaccatttgctttgcctgcaaactgagcgatcagtcccgggaaagacataatggaagaagcaaaaatgatcgggataactccggcagtgtttactttcagaggaatatggtttgtctgaccgccaacaagctttcttccaaccatcttcttggaatactgtaccggaattcttctttcagctccgttgagaataagaacaaatacgactaccacaagaataactgcaaagatgatcacacctgcaagcattcccttggcaattgttttgcctttaataaagttctcatacagagttaccatatcacttgggattctggacacgatatttactgcaagtacaatagaaataccatttccgattcccttttctgtgatacgctcaccaatccacatcagcatagcagatcctgctgtcagagatactactacaacaatacccttaagaatgttcatgtcctgaacaatgttgcctcttgcaaaaccgattgtcattgcaacagactcaaacagagcaagaccaaccgttacataacgggtaattgctgtcatcttctttcttccttcttcaccgtctctgtgcatttcttccagagcagggatggcaattgtaagaagctggatgataatggatgatgtaatatatggtgtaatgttcagagcaaatatggacatactctcaaaggagccgccggtgaacgcatcaaagaagttaaatgcgtccccggtgttgctctgaaaccactgtctgaatacgtcgctgtccacacccggaacaggaagctgagatccgattcggatgacaaagatcattccgatcacgtaaaacagcttacgacgcatctcttttactctaaagagacttttgagagtttcaaacattaaatcacctctactgtaccaccagcagcttcaattttagcttttgcggtctcgctgacagcgttcacttttacgttaagtttcttagtcagctcaccgtttccaagaatctttacaccgtcgccgattttggaaattgcgcggctttccagcagactctcagctgtaacctctgctccgtcctcaaaacgattcagaacgtcaacattgattgcaatgatctctttggagtttctgtttttgaagcctctcttcggaagacgtctgtataaaggcatctgtccaccttcaaatcccggtttcttgtgtccggaacgtgctaactgtcctttatgtccttttccggctgtctttccgtttccggaaccatgtccacggcctcttctgaagttatcactgtgcttggaaccttctgcaggtctcaggtttgataaatccatgtttggcacctccttttattatctatactgtgtagaattactcttcaacttttaccagatgctgaacctgtttgatcattcctcttgttgcagcattatccggcatttcaactgttttatgcatttttgtaagtcccatagcaactacagtctttttgtgtttcggaactgcaccgattggagactttactaatgtaaccttaattgtatctgccatttttcgtttcctccttatgccagaatctcatctacagattttccgcgaagtttagcaacttcttccggagtcttcagctggctgagaccttcgatggtagccaggacaacattctgtttatttctggagcccatacattttgtacggatgttcttgatacctgcaagctcgattacggcacgtgccggacctccggcgattacaccagtaccttccggagcacgtttcagaagcatctcagcgcttccgaatttgcctacgaagtcatgtgtgatagaaccgttctcgtctcttgctactgttaccagttttttcatagcatcttcttttcctttgcggatcgcttccggaatttcagctgcctttcctaaacctgcaccaacatgtccgttgccgtcacctacaacaaccaaagctgtgaaacggaagttacggccacctttaacaaccttggtaacacgtttgattgacactactttatcttctaattctaactgactagcatcaataagattatgtttcatgtgtctttttcctcccttttagaatttcagtccagcttctcttgctgcgtctgctaatgctttaatttttccgtggtaaatgtagcctcctctgtcgaaaactacgctctcgatacctgcttcaactgctttcttaccgattacagttccaagatatgctgctgcttttacatcgtctgtatgctcaagctctgcttttacatctttctgaagagtagaagctgatactaaagtttttcccacgctgtcatcaataatctgtgcatagatatgcttgttggaacggaatactgccagtcttggagtagttgctgttccattcagatgatgacggagtcttctatgtttcttttcacgaatttccgctctggatgctttcttaatcatgttctcactctccttatttatttcttaccggtcttaccgactttacgtctgatcacttcgtcagcatatttgattcccttgcccttatatggctccggtcttctcttatctctgatctctgctgcaaactgaccaactttttctttgctgataccggaaacaatgatcttgtttccatcaactttggactcgattccttcaggatcttccatctctaccgggtgagaatatccaagagaaagcacaagctttttgccctgcttctgagctctataacctacaccgtttacctcaagctcttttgtgtagccttcgtttacacctgttaccatgttctggataaggcttcttgttaaaccgtgcaaagctttcatttttttcagatcgtttggtcttgtaacaactacatgaccatcttctactttgatttccatttctgtaggaagcgctctttcaagtgttccctttggccctttaacggtcactacattgcctgctgcaacatttacttcaacgcctgcaggaatagctaccggaagtctgccgatacgtgacataatattgtcctccttacttagattgtcggagagatgcaagatctctctgttttcagtgtttatatctttctttatttcaagatatcataattttacacgcatccctcaactaaactcgcccgcgctacagctgggctcgttgaggttcgggatggacctcgcactaaattcatgctgcgcctgacggcttgcattcattaagttgctttcggcctaccatacgaatgcaagaacttctccgccgacatgaagcttacgagcctctttgtcagtgataacgcccttgtttgtggaaatgattgcgattccaagtccgccaagtactctcggcagctcatccttgcctgcgtatacacgaagacccggtttggaaattctcttcagacctgtgatgatcttgtcgtttttagtctcaccgtatttcagtgtgatatgaagtgttttgataacaccgtcttctactaaatcatactttgcaatatatccctcgtcaagaagaatatttgcgatagcaattttcattttggatgccggaacatctactgtgtcatgttttgcagtattagcgttacggattcttgtaagcatatctgcaatcggatcgctcattgtcatgttagtttcctcctctaattttcttttcagactttacatgattcgttattatttatataaatctgcacaaggaagttcggttcactaaattcagcctttgcgtttgcccggcttcattaagctccctcgaacgacctttgtactaaattcatgctgtgcctgacggcttgcattcattaagtgttttcgattaccaggatgctttctttacgcccgggatctgacctttgtaagccagttcacggaagcagatacggcagataccgtattttcttaagtaagcgtgcggacgaccgcaaattctgcagcggctgtattctcttgtggagaatttctgtttgcgctgctgtttgattttcattgctgttttagccatttaaattctcctccttatttagcaaaaggcatgttgaactgtgtcagaagctcacgagcttcctcgtcagtcttcgctgttgtaacgaagataatgtccatacctcttaccttgtctactttatcgtactcaacttcagggaagatcagctgctctttgataccaagagcgtagtttcctctgccgtcgaatgcgttcgggtttacaccacggaagtcacgtacacgaggaagtgcaaggttgatcagacgatcagcgaactcgtacatcttctctcctcttaatgttactttacagccgatcggcataccctctctgattttgaagttagccacagattttttagcctttgttgcaacggctttctgacctgtgataagctccatatctgcgatagcagcgtcgagaagcttagcgttctccttagcttcaccaacacccatgttgataacgatcttttcgagcttcggcacttccataacgtttttgtatccgaattttttggtcatgttgtccatgatctcatttttgtaaagttcttttaatctactcacctgtcatgcctcctctcttatttatcgataacctcgcctgttgcttttgcaacacggacttttttgtctccgtccatcttgaatccgactctggttgcttttccgtctactaccagcatcacgttagatacatgaagagcggcttctttctttgtgattccgcctgcctggtttgctgcagatggtttgctgtgcttagtaaccatgttgacgttttcaacgatcacggtgttgtcttttacgttaacggcaaggactttgccctctttgcctttatcttttccagcgattactttaacagtgtcgccttttttaatcttcatagctgacattaggcaccctcctataatacttccggagctaaggaaacgatcttcatgaattttttctcacgaagctctctggcaactggtccaaagatacgagttcctctcggagttaaatcgtctttaatgattacggctgcattttcatcgaaacggatgtaggatccgtctttacgacgagcgccttttttggaacgaacaacaacagcttttactacgtcaccttttttaacaacgccgcctggtgttgcatctttaacagtagcaacgatagtgtcgccgatatttgcatatcttcttgtagagccgcccataacacgaatacaaaggatttcttttgcaccagtgttatcggcaacttttaatctagtttcctgctgaatcatactggtttcctccttatttagctttctctacgatctcaaccagtctccatctcttgtccttggacagcggtctggtttccataacttttacggtatcaccgatattgcactcattctgttcatcatgagcttttaatttatatgttctcttcacgatttttttgtaaagaggatgttttacatggtcttcaattgcaactacgatggtcttgtccatcttattgctgacaaccttacccacacgggtttttctcagatttctttccacgattctgtcctcctatattcactatttcgcagcgttagcctgctcagtgattactgtctggattctggcaatattcttacgaacctctttgatccggcttgtattgtctaattgattagttgcattctgaaatctcaggttaaaaagttctttcttagcagctactaattcttcgtttaattctgcagctgattttgcttttaaatcttccacgaatttattaattttcactgttatcaccgccttctaagtctgcacgagaaacgattttacatttacatggtaacttgtgcattgcaagacgtaatgcttcacgggcaacctcttcggatacgcctgcaatctcaaacattacacgtcctggcttaacaactgctacccagtattccagggaacctttaccggaacccatacgtgtttctgctggtttcgctgttactggtttatctgggaaaatcttaatccaaacctgaccaccacgtttgatgtaacgtgtcatggcaatacgggctgcctcgatctgattagatctgatccagcacggttcggtagcaacaagaccgaattcaccataattgattttgttacctctaagggctttacctctcatggagccacggaattgtttacgacgttttactctttttggcattaacattatttatcgctcccttccttagttccttttgtgggaagtacttcaccattgtagacccaagcttttacgccaactttaccgtaagttgtgtctgcttctgcgaagccatagtcgatgtcagcacgaagtgtctgaagcggaatagttccttcgctgtagaactctgtacgagccatatcagctccgccaagacgtccggatacggatgttttgattccttttgctccggctttcattgttctctgcattgtagatttcattgcacgacggaaagaaatacggttctcaagctgaagtgcgatgttctctgcaacaagctgtgcatctctgtccggtcttttcacttctttgatgtcaacgatcagttttttatctgtatatttctgaagctcagcttttactttttcgatctcagatccgcctttaccgattacgatacccggtttagcagtgtagatgatgatcttaactctgtcagatgctctttcgatctcaatcttggaaacacctgcgctgtacagttttttcttcaaaaatgttctgatattgtagtcttcaaccagataatctgcgaagtctgcttctgcataccatctggaatcccaatccttaataataccgactctaaggccatgtggattaactttctgtcccatgctcttcctccttatctttcatccagcacgatggtgatatggcttgttctcttctcgattctgtaagctctaccctgtgctcttggctgaatccgcttcattgtaggtcctttgtttgcatagcactctgcaatgtagaggttttctgcgctcataccgttgttgttctcagcgtttgcgattgctgactcaagcagctttttgagaacgctggaagcatatctcgggttatatgtgaggataccaagtgctgtctgcacatctttgccacggatcgcatctaatacatagcatgctttctgaacagaaactcttgcataagataattttgcagacggtcttgtctctttattattctcatttctggctctcttaatctggcttctatgtccctttgccattttaaagtgcctcctttctcgtaatcaatcatctatgggaatcaccgtggtcacccttcactgatgtccggtgaccaggcgaatattcttattttatctgcgaactgccgctacagtctcacaaattatctgacaccggatttcttctcgtcttttccgtgtcctctgtaagttcttgttgcaacgaactcaccgagtttatgtcctaccatatcctctgtaacgtataccggaacgtgctttcttccgtcatggacagcgattgtatgtcctacgaaggaagggaagatggtggaacgacgtgaccatgttttgatcacggatttatcgtttgcagcattcatagcgtcaacctttttcagcaggcttgcatctgcgaaaggtccttttttcaatgaacgagacattctgtaccctccttattatttcgctaaagcttttccatcgcgtcttcttacgatgagcttgttggactgtttgtttttctttctggtcttcagaccaagagcaggtttgccccatggtgtgcacggacccggacggccgataccggtctttccttcaccaccaccgtgcggatggtcattcgggttcattacagaaccacgaactgtaggtctgattcccatgtgacgtttacgtccagctttaccgatgtttacaaggttgtggtctccgtttccaacttcaccgattgttgcgcggcatacaagcggaaccattctcatttcacctgacggtaatcttaatgttgcatatttgccttctttagccattaactgagcgccgtttccagcagaacgaaccatctgtccgccctttccaggatgaagctcaatgttgtggatcatggtaccaaccgggataagttccagtggcaggcagttaccaacacggatttctgcctccggtccgttcataaccttctgtccaaccttaagtccttccggagcaaggatgtaagctttctcgccgtctgcatagcagatcagagcgatgtttgctgttctgttcggatcgtactcaattgttttaactgttgccgggataccatcttttcttctcttgaagtcgatgattctgtattttcttctgcttccgcctccgcggtgtcttactgtgatcttgccctggttgttacgtccggcatttttctttaaagacactactaaggatttctctggggtgcttgttgtgatctcagagaagtcagaaccagtcatatgtcttcttgacggtgtatatgggttataggtcttaattcccatggtgtttctcctttcgaatttgttatcgtgctttcgtgcacatagtcaggctatcgttttggatcaaagtccctcgaagatctcgatatctttgctttcctctgtgagagctacgattgcctttttggtcttggctgtttttccaacaaccataccgcggcgtttctttttaccatcgttgttcatggtgtttacgctcttaacttttgttccttcaaacatcttttcaacagcttctttgatctgagctttgtttgcttccggatgtacgaggaatgtatattttttctcacccatgatgttcatggatttctctgtaatcacaggtttcaggattacgtcataatatttgatatctgccattatgcgtacacctcctcaatggatgctactgcatctttagtaaccactacagtattgtgtttcataacatcgtatacgttcatagtgtttacagttgcagtctgtacatcagcgatgtttcttgcggaaagtactacgttcttatcatcagaagctgtgataaccagagctttctcagctttcaggtttgtaagcactctctgcatttcttttgtcttaacctctgcaagtgcaaggctgtcaacaactaccagtttattatcctgaactttagaagtaagagcggatttcagagctgctcttctttcttttttgttcatttttacttcatagtctctcggaaccggagcgaatacaacaccgccgccagtccactgtggtgcacggatggaaccctgtcttgcatgacctgttcctttctgtctccacggttttcttccgccgccgcttacttcagaacgagtttttgctttctgagtaccctggcgtttatttgcaagctgacgaacaacagcaaggtgaaccagatgctcgttgatctctacaccgaacactgcatcgttcagttccattgttccaacttcattgccttccatattataaacagttacgtttgccattctgatgctcctcctttctcaattataaagactttactgattctttgatggtcaccagagatttcttaggtcctggaacagcacctttaactaacagtaaattattctctgtatctacgcgtacgatctcaaggttctgtacagttacctgaacatttcccatctgacctggcatctttttgcccttgaatactttactcggatcagatgcagcgccgttggaacctgcatgacggtgatatttggaaccgtgagccataggtcctctggactgtccgtgtctcttgatcgcaccctggaagcctttaccttttgagattgcagttgcatcgatatgatcgcctgcagcaaagatgtcagccttaatttcctgtcctacctgatattcagcagcgttgtcgaatctgaactctttcaggaatctctttacatcaacgcctgccttttcaaagtggcctttttccggtttgttgaccagtttctctctgatctcaccaaaaccaacctgaactgctgcatatccgtcgttgtcttcagtcttaacctgagttaccacacacggaccagcctgtaaaactgttaccggaatcagaagaccatcttcattgaagatctgagtcattccgacttttgtagctaagatagctttcttcattacattttcctccttatagcggattgccctggcgggtaatcatatagtttttgaagcactcggaatcccgagtgaacttaccttgttcatgtgccgactgacctgagccagccagcaagcagtaccgggtactgcttattttgttttcattttgatatcgatgtgaacacctgccggcatttccagtctggaaagtgcgtctacagttttctgagtaggtgtcatgatatcgatgagtctcttatgagttctctgctcgaactgctctctggaatctttgtatttgtgaacagctcttaagattgttacaacctctttttttgtcggaagcggaaccggtccgcttacctttgcaccgttcttcttaacagtgtcgatgatttttgctgcagatgcatctactaactgatgatcataagcttttaatgtgattctcattacctgatttgccataaaaaaagtctcctcctattcgtactcaattatgcagtacgacaagcggcgactgtacacatctccgtgtgtgtcctaagacatctcttcacacgcccatcccaagatggttattgaactctgtacagtgacttgtcgtcagtttcctaacttgacattcgctccacggaaaacctgctaatcaaagcagcaacctcgcgcttcattgctatcatgtcacagcagttatcagtatacacaatgatttccaataatgcaagtactttttttaattttttttattttttttgcatatgcagaaatcccatggcatatacgcaaaaaacagtacctatataataggaacagtttttattctcttataaatcctatataaaacagccgtcctttttcttttgtataaccatatataataggaaagatttccctgttttaattattttcacacaaaaaacaaagcgcagaccggatcgttcatacctgtctgcgctttgctgatatttctttttattcttcttcgctttcttctgtgtctcctccaaggatatcagaataatcaaagaatgttacttttgtaatggagtctctcacaatatcaggagcgtctccttctctttttgccttatctgcaagctgggaagccgtccataccggcatcgccatctttttgatctcaacaggagcttcctcttcctcccattcctcttcttctctcttcatacggactctttcttcctgaagctcacggaagctgggaagctcttctgtgtgatcagccggaatctccatagctgccgcttcttctgctgtagctgccgcaatctcttttttcagcagttcatgcgcttcgcttgtagccgcctgcatattctccggacgaacccctgatctttcctggcgtcttaccgggcgttcctcttccagatcgtcctcgtagatctcatctacaaatccgccggtacggatcttctttcttctctctttttcttctttcttcgccctttttctgcggtctttttctccgtaaagaagctctctgtcctcttcctgcatacgtttttcgcgggctttttcttccatcttcagttctttctgagttttaagatacctgcggtctccctggagatcttcatactcatcaagtgtttcaggctttttccacagctctgcgatcacatagagaatgatcaggaaaagaactgcaagagcaagaacgataattccctctgtgctctctgttgccgccataagatatccgatcagaggaactgtgaccacaaccttgggaacccagttttttacagacacattgatattttcagatgcggctgcctcgggatcaatggcaacccctgtatttgtctgtctgtcaacacttacaaggttataacgataagtaccttctccgtcctgtacaaggatcggagcgccggcatttactgtctcagtctttacaggaatcgcataagtaacggaacccatcgccaggtttgtttccttatttttattatcaacgatcaccgtttttaccccaaaaaacggcggcagtgccagacccagcactatagcaatcgtacatattattacaaaatgtacgataaatttcaaaaatttagacatttgtatatccctcacttctgtttttgtggtagtagtgttttgaatactttagttattataccttttttttctgctacggtcaacttataatatgtccgaacctgaaatttcgttttctggtttttatttctgatatgcagcgtatccgtttctttttcccgccgaaaaagcatccgctttttcggtttattttaattcgtcttctgttccatagacctgaatctcatatattctcgctgcggagtcagagccctgtgtaggtttcaccacagatacttttacatagcgggcatttaccggagtaaatgtgtctgtggtatttccggctgtatttttagtaacctttgtcactggagtaaattctgtattgtctgtactgacagagatttcatagctctttgtattcatatcagcgccttctccgccggcctccgcatgactgatcgccacctggcttacagccatctccctgccgagatcaataacaatttcatgaggcgcagttcccgttgcgcacctttttttcgcaatatccccgtctaccgcaaattgaggtgcctcattttcgtttgtaaaggaagttgcctgcgtttcctttccctgagacagaagagtcagttcttcatcttttcccagcccggaagtaacaaccaccgaaatactttttgtatcttcacctgattcgttctttgcagttaccgatacttcgtaaataccttctttttcaaacaccgcttctacagattcgccctctgcagtttctttgctgcttcccggaacagaccagcttatttcctctgtattttccgagcacgcactggcaaaggtcaccgtacttcctgctcctaccagagtctgagatgctgtaagacctgcttttggagcgctgttgtccggccactctgtttttacagaagctccctttccctgctctgcctgctcatttaccggaaccaccttaaattcagactgctttgtatcatccgtccgtgtcagcgtattaatataaaaacactttgtattggatttcgtaacagttgtaaatactgttttttcttccaccggaagatctgcgctgtacatctgaatccgggaagctttgcctttttccatatttccgtaaagcttgacagaatttcccccataccaggcatcagctacatcaaagtctgctttcagagaattttctccttcattctcgatcatccaccgataggtaggcagaatatctcccacgcttctgttattccagtccattttggaaacctgctctccctcccggaaaaagctgtatccgtttcctgtggaaaaattcgtcacaaagggaagtgttgtcagggctgatttttccactgcataggtggatattcctctccactgctcttcggagctgtactgaatctcctcagaaggatctccttcgctgtttacccacagagcatcctctttctgccggaattcatccggtgtcgccgccgagtaataagcccagctggggcaatacagtcccagggaggtatttgtggtattttcgcctgactcgaacagatcccagcgtacaggtgtcagatatccctctgcctgcacgtcaacgcctgcgtacaggtcatacggactgattcccagctcctctgctttttctccggatgccttcagaagatctttatccgccagctcatcctctgtccaccagaaattcagaaacatttcatcagcaacagcatttccctcttcatctgtcataaacattgtattcttatctgtcagagcattctgccagtccatttttccttcagaggtcatggaatcataatataccagtctcatttcaggagcctgttttttgaaatatttaataaattcctgcattttaaccgcgtcatctctggtcagcgttctttcctcagcgccctctgtttcctgattgataaaccatccgtcaaagccgtaggtttctgccacctgaataagtttgtccgccacaggcacaaagacttgcagacatagtaactgccattcctacagccgctgttctggtaagaaattgtctctttttcataaacattcctctcttttcatgaaaatttatctatactataaccagaaccctattaaaataacagtgtaaaaaatctagtttatatgtacttacttcaggataaaaacttgtttttttactgcgctcaacttataatggcacatatcaaataataatcagaaggaggacctttatggattttctgaatttgctctcacaatatcggacacctgcaggcgatgtcttttttcagggcattactcttcttgctcaggaaacatttgtagttgttgtgatctgctggcttttctggtgttccaataaaaagcttgcctactgtctcggatttacatatttcacttccgggcttcttgtccagggattaaaaataacttttcgcgttccccgtccctggcttctggatccggcctttgaaccggttgcctccgcagtgcccggcgcaaccggatattcttttccaagcggtcacacacagagcatcacggctcttctgggaacactgggactgtatacaagaaaaaagcccgcccggtttctgtgcgcgctttttattctgcttgtaggcttttcccgtatgtatctgggctgtcatactcctcaggatgtaattgtatctttcctggtaactttcctgtgcgtggcgctctgctattcttttctgtataaaaaagatttctcggccggaaaagaacttttgatttctctgtgcatggcagccgtatgcgcggctcttctgatctatacagctgttctttataaaaacgaaacaattgaatttcactatgcgcaggactgtatcaaagcctgcggcgccggctttgcctttgctgtcggttattatattacagaaactcatatttcttttactcctccggattccacccggaaacgtatcattcgttttgttgtgggaatagcagtgacgctgcttatccagaccggactgaagcctttgataggagaatctcttccagcttcttttctgcggtattttatagttgttatatggatcgtaacggtttatccgtttctcttttccagaaaaaaataagatttttgttatttagaaattattttaaagagtttcctgacagacaaaaacacctccctgaattggtcttccttccgggcggtgttttacttttcatttttatttaattttgattacttaaataccgttctatactgctcatagcagcttcttcatcttctccattagcggaaagcatgatttcttcacctgaatccagccccagagtcatcatacccataatgctctttgcattgacctttttctttccgatttcaacatatatttcactgttaaactggctggctacctgtaccagctgcgccaccgggcgtgcttcaagaccagtagacagttgaatagtaacaggttttttaatcataataactcctccttgtcatttcgcagctcatccgctatctcgcttaattttctgagacggtggttcacaccggacttgccaacctggggattcagcatcattcccagttcctttaacgtggcctccggatactgcagcctcagctcagcgatttctgcgagaccttcattgaggctgtaaaagccaaccctgcgctcaataagccggatgtcctcgatctgcttcactgctgcactgaccgttttattaatatttgctgtttcacaatttacttttcgattaacagaattccgcatttctttcagtatccggatgttctccagattcatcagagcaacatttgcttccatcactgccagaatatctacaatctgtgcgccttctttcacatagaccacatatgattttttacgcagtacaatcttggcatcaatctgaaagctgcgaatgagctcctgcagctgttctgccttttgctgatccgaacatacaatctcaaaatgatatcccttttcaggatcactgattgaaccggacgccagaaaagccccgcgaataaacgcccgcttacagcagctttgctgtgtgaccagggtattatctgaacagagcgcctctccgtcttccctgcttacagaaagtttcgttccctgaagaatgttctgtatcttctccgtgtcctttatctccacaaaatagatatttcccttcttcatctgacgactttcgcggacaattatttcagtatctatattaaatgttttttgcaataatgtaaagccttttcttacgactgctgcattttccgtctgcagtctcagacttccatcagatgtgattctgccgcaggcgcttaaaagagctgctgtctctgcaattctgcagtgtctggcagaactgatctgtctggaaagttcttctttcaccttccccgaaaaagacaattcctcgttctcctgtctgcttatttttccgcctcttactgtttcttcagaagagcatctttcccaatatcccgatgctccagacggatgccatactctcttgtttcctgcagcctgtcataaagaactcttgccagagttacagacctgtgctttcccccggtacagccaatgccgatcaccagactggtttttccttctttcgcatagtttggaatcagaaatttcatcatatcttccagtttgtctgcaaaatcagccgctgcctgacagtccattacatactgaaaaacatcttcatccatgcctgtatgtggccgcagttcatcaatataataaggattcggaagaaacctcacgtcaaaaacaagatctgcatcatccggtattccatatttgaaaccaaaagaaagaactgagatcaccatattgctgaattttccgttatcaacaaaaatcctgttgatctcttttttcagctctctggtaagaagatgagaggtatctataatatagtcggctctttctttcaggaatttcatcttttcccgttctctgtggattccttcatccactcttccatacattgccagtggatgacttctgcgggattctttataacgctttaccagcacacggtcatccgcatccagaaaaagaatttcaaattcatacccggcctcgccaagctgttccagcaccttttccagttctctaagatcccggccgcttctggcatcaattccaatcgccgcattctgtacgtcctctccctgcattcccgccatcagggacacaaatttactcataagaggaatcggaagattatccacacaaaaatagcgggcatcctccagcattttcagagcagtacttttacctgctcctgataatccggttactattacaagacgcattccttatctcccgttaaagtctcccaggaacttcacctcaggttccagggtaactccgtatttttctcttaccacccggatcacatgatccatcagacttctcacatcttcagcagtggctccgcctgcatttatcacgaaaccgcagtgtttttctgaaacctgcgccccgcctacacggtatccccgaaggccgctgtccataatcagctttcccgcaaaatatccttcgggccgtttaaaggtactgcctgcgctggggtaatccagaggctgtttttctgtacgccgttccgacagatctttcattgtggcgcggatcgcttcctcatctccctttttcagcgagatcactgcctcaagcacaagatatccggcagtcttgataatgctggtccggtatcccatttccattttttctgcagggattgtaaggatctccccctccctggtcattaccgtaacctctttcagaacgtctttcagttctccgccataggcgcctgcgttcatcacggcagctccgccgatggttcccggaattcctccggcaaactcaaatcctgtgagagaagcatttcttgccgctactgcaacagacgaaagcagtgcgcctgcgcaggcatgaatttcttcaccgtccagacggatttcttccatattgcggtccatctgaatgatcacacctctgtatccactgtcactgaccagaagattgctgccatttcccagaacaaaaaacgggagcttttcttctttgcaaagtctcagcacttccctgatctgctcataattttccggcataacaaatacgtctgccggtccgccgatccggaatgtggtatgctggctcatcggctcatcaaaaagcactctgttgtttccgagaatttcgataaatttctgtctcatttcttctttcacaggttctttcctctatctttctattttttatttaacccttttccattttctgtcaggatatctctgacaacctccccggcgatcagcattcctgccacactgggcacaaaagaaatacttccgtcgactatctctccgtttctggcctcggtcatcttcttcggacaccgttcccgggaatacagaacctttactttgcggattccttttttgcgaagctctgtacgcattttcttcgcagccggacatatattgcctgttctggaaatatccgtaatctcaaatctggaaggattcagttttccctctgttgccagacaggagattaccggcgtatggcatagttttgcctgttcgatcagaagaagcttggattccatcgagtcaatggcgtccacaatataatcatagcctctcaggtcaaacatccccgacgtatccttattgtaaaaggtttcgtacgtatggaccagaatattctcatcaatatcccggatccgttccttggcaacctgtacctttttcctgccaatggtagaatgcagggcaaaaagctgccggttaatatttgttgcagatactacatcgtgatccaccagcgtaaggcttcccacgccgcagcgggcaagagcctccactgcataggaacccacaccgcccagaccaaacacggcaatctgcgctcttcccagacgatccactcctgtctgtcccagtaataattccattcgggaatatacgtcgtacatacgcaaacctcctgcgtcattgtttatctttttaattatactatccgctgtagaaaaagtacaggttttcatagttttttaagaattagtgtataattttcatgtttttttacataatacacactaaattccgcgaaaggagaatttctcatgtggcagcagatatttctgggtcttctcggactttgctccggaaccattattgccagcggtgtggcaggacttctgatcggtctttccattatcccccgatatgcaggcattacccataccgctgatcatatccttctttatgaagatatgtgttttctgggaatctttcttggaaatcttttttgtcttttccggttccccctgcctctgggaactccttttttacttttattcggtgtgttctccggtattttccttggaggatggatcctggctcttgctgaagtagccgacatgtttcctgtttttacaagaagaatccgtctgacacagggacttcctcttatcatcctgtttattgccctgggaaaactgaccggtacacttttcttctattatttcgggtggcagtaagacccattatattcataaatatctgaaaagtcaaaataaattgaaaggaaaaatttatggcaaattctgaacagctaaaaaaacaaaaagaatatgagaaatatgtaaagcgggtaacccctgtccacagccttcccctgaatatgataaaagcattttttacaggcggactgatctgtatgtctggacaatttcttctgaatacggcccagagccttggcgcagacaaggaagaagccggaagctggtgctctctgattcttattctgatcagtgtaatcctcaccggtctgaacctgtattccaaaatcggaaaattcggcggagccggtggtcttgtgcccattacaggcttcgctaattctgtggcagcctctgccattgaatttcaggcagaagggcagatctttggtatcggctgcaagatctttaccattgcaggacctgtgatcctttacggaatcctcagttcctggctggttggatgtgtctattatattcttaaacttatggaggtgatcgtatgactgccggaaaacagacaggaagcgccagcatttcctttgaacagcctgtatacattgaaagcgcagctgctattgccggaaaaaaagaaggagacggccctcttggaaacctttttgacatggtttccaaggaccctctcttcggaacccagacctgggaggcagcagaaagcactcttcaaaaagaaaccgcagggcttgcaatcggaaaagccggactgactccccgtgatatccgaatggcctttgccggcgatctgcttgcccagaccattgcctcctctttcgggattgcagaaatggacattccgttttatggactgtacggcgcctgctccactatgggggaagcactgtctctgggagcaatggcggtctcagccggttacggagaacatattctctgcgctgcttccagccattttgccacagcagaaaaggagttccgttttcctttaggctatggcagccagcgtcctctgtccgctacctggaccgtgaccggaagcggtgcctgtgtcatcggctccagaccgccggttccccaggagcgttcagaacactctccgctttgctgcagttccggctgcgccgtcattacagggatcaccacaggaaaggtaatcgactatggtttccatgattctcttaatatgggcggctgcatggctccggctgcctgcgataccatatggcagaatctttatgatttcggccgcaccccgcaggattacgacgctgtttttaccggagatctggggatggtaggccagcggatccttcaggatcttctttttgaaaagcatattgatatcagcaaagtccatcaggactgcggacttctgatctatgacaacacctctcaggacacccattccggcggaagcggctgcggctgtgcagcttccgtgcttgcagcctacattcttccggaggttgtccggggcacatggaaaagaatcctctttgtgccaacaggagccatgctctccaaggtcagctacaacgaaggagaggctgttccgggaattgctcacgcagtagtcattgaacacagagatttttaacaggaggaacatctcatggattattttaatgcattctgggtaggcggccttatctgcgctcttgtccagattcttcttgacaaaaccaaacttcttcccggcagagtcatggtcattctcgtatgctccggagttatcctcagcgccgtcggactttaccagcctcttacggactatgccggggcaggcgcatccgtgcctctgaccggtttcggccagatattatggaagggcatgaaaaaagccattgaccaggatgggcttcttggtctttttaccggcggatttaccgcctgctctgcaggagtttccgctgctctgatcttctcctggatcggaagccttattttccgccctaaaatgaaagactgatctttcagaaaggacctcagctatgaacgacaccttatatcttcagcttgaccagaatatcgaagttcatcatcctcatgtataccttcaggatattgcccgtctgtcctgtaccaatgcaaagcttctcaaccgccttcgggttcttccggttgccaacctggacccggaaaaacccggccggtatgtgatgactgccatggatctggtagatctgatccagaaaaaagagccggaacttaccatcacccatataggcgaacctgattttattcttacctacaaaaaaacaggagcttcccatcagctctttcatattgtcaaaactgctttcgtctgtctgatttccttttttggcgcagccttctctattatgacctttaatacagatgcggacgtaggaaagcttttcaggcagatttatgaacaggtaacgggcagcgtctccaatggctttacgattcttgaattcacctactctgtaggccttggactgggcgttctgtttttctttaatcatttcagcagggtaaagatcacttcagatccttcccccatgcaggtgcagatgcgtatctacgaagaccaggtaaactccactgtcatcgaagatattaaccggaaacaggcggctgagcatcaggaaccgtcataatactctctcagccgctttatgatgcgtttttccattctggatacctgaacctgcgatattcccagtctgcctgcgatttctgtctgagtcatatcctgaaaataccgcatgcagatcagccttctttcatccttttcaagttttcccagaacctcttccagcagaatcctgttcaaaagcttttcctgccggttttctttttcctcaagtctgtccgccagagtgatctccgttccctctccctggtacacagtcttataaatggattccaccggagctcctgcctccattgtcatggcaagctcttccggagccatgctgactgcgcgggcaagctcctccatgtcaggctcccttcccagactccgctccagctctgccctggcctgaaatactttgctgcagttttcctttatggatctgctgaccttcagcatcccgtcatctctgagaaatctccgtatttctcctgcgatcataggcaccgcatacgtggaaaattttacgtcaaattctgtgtcaaacttatccactgcctttaaaagcccgatgcttccgatctgaaaaagatcctccatttctacgccccggcctaaaaatctttttgccacactgtagataagtcctgtattctcctcaaaaactgtatctcttgcctctttatccccctggtgcgcaagcccgatcagggcaagagtatgctccattccccctccttatcttcggatcgtctttttcatgtggacagaagttcctactcccacttcagaatcaacagttacctcatccataaaagcttccataaatgtaaatcccattcccgaacgctctttttccggttttgttgtatacaggggctccatggcttttttgacatcagaaatgcctactccctgatctgtaatgtccacaaagatctctcttcctttcagcttcagatccatgcgtatcttatgtatctcgccctcatatccatgaataatacagttagtcacagcctcagacactgccgttttcagatccgcaacctcctccagagtgggattcagctgcgtgcagaaagaagctgccgcaatacgtgccatcccttcgtttaccggacggctgtcaaaaacaattgtcatttcattggtgttttccatggtcacttctcctctccctcagctttctgaatttctatatatctgtgaacccctgacagatgcagaagcttgtcaatatgaggattcacctttactgcgcagatgcacccctgcctcattcccagagcccggtaacgccccatcagaagtccgatgccagagctgtccataaatcctgtattctgaaaatcaaacagcatggtcctgatgtatacgtggctcatgatccggtctgattctctgcgtatctcatctgacaccggatgatccacatctcccggaagatgcacagtcagacttactccctccagttcaaacatttcattcatgattattttcccccttattctgcattttattccatttttccacatttttttgcctgatgataaacatatatttatttctccgctgatttgttgttgtcagaatcctggctgatactcaggcgtttttccaggaaggttcacacaaaatgtcctgttttcccggtcaaaaaaagggatgtgcctgcgcacatccccctgcttcgaggtttttctcatgttttctgcattattcataataggagccgtcatcatagcttccatcatcatagtaaccggattcatcatagcttccgtcatcgtagcttccgtcatcataatatccggagtcgtcatagccggaatcgtccgtacttccttctgtactgccggaatctccgctgctttccccgccggatgactcctctgtctgcggctgctccggatctccgatccctgccacccctgtagcgtcccggatcgtaatgtaaatgggcttcagggactccggaagaacgtccacctgaacattctttactgctactgccgcctcatccagattctgctgctggtaaaaggtgtacgccgtaagaagcgactcgtagcttttgctctttgcctgttcttctgtcagctgtttcgatacagtctctgctgtattatcagattcctccgcttcaccctgaacctttgtaagctctgccccctgagttgccagagactcactgtactgaacaatctgctggtttgcttcctgataaatgccctgttttatggcaggaactgcaagaagccagaaggctgccgcgcctgctgccattccggacatgatcagaaggaaaaccggaagtctggatctttcatgataaaccggcgtctgaactgtatactcactttctgccggatcgtattccatatttttatttttgttatcccggaaaaagccttttttctgcttttccagtctggttgtcacgccagtctgttcatctacttcccttaaaaatctgagagttgtggtatttgtcttgtcaatttttgccgcttttctgagcgttctccttgcccggctccactctccgttttttatctggatcagagccagaagatgataccccttgatcagcttgggattctgagaaagaatccggcgaagctgaatggaggccatatcctcatgaccttctctgcacagaagaagcgcgtggttatatttccggatggtgtcattgatagccttcagtttatttccgtttgcctgaagtctgccaatatactcagacgcaagatttcttgtgggctgaagattcttgctgatcacccattcactgagcgcggcaaccacctcgcctgtttcaaaatacacaagccccagaagatttcttgccctgatgtttcttttatcataaataaggctctgtttcagacaggcaatcgcccctgacaggtcacggatgcttgccttttccagcccctgattataaaagctcttggaaagataatccacttttttctgaatcagtacattgtacccgcagcttggacaataatccaggtccatgtctgtaagaaatgcaccgcaattcacacaattcatctgtagaattctccttattattttacacgcctgttactcttggcctctcttaatacttcctgaagcacatcaagaatatcagtgagctctctgtcgtaaatcgcaccttctgcttcccgcacgtcaagacatggctcaaacttcttcagctcttcctcataatctatcatttgtttccgcctccttgctcaatgttttccgagcatacaggtacacccctgggtgtttccgcctccttagtgctcagtcattttctggatgatcgctttgatctctcccaccagatacagagatcctacgcagaaaagcattccctctttccctctgtattcaagggctcttctgaatgaagactccacatcctcgcagctttctgcgcaaaggcatccctctttccggaaaatatccgcaagctgctccgccggaacctttctgtagcctcctacctgagtcacgatcacatgctgaaaccgaatccgtcctgcaacagtccggatcatgtctgtataatccttatcatctacagcagaaaacaacagcgtcagaggataatccttctgaaaatgttctgctgtctccacaaacttttctactccgtcttcgttgtgagcgccgtccacgatcactcccggaagaacggtttccatacgtccctgccagcgtgtttccctgaggccacgaagaacagagtccttcggaaggtttaccatatctttgagaacctctgcggttttcagcgccagcgccgcattcatcacctgatatcctgcaataaacggaatggaaaatgctgtgtttccataatactcattctccatacaaaaatcaatgcccgcactggtatttcgcagaatttccgtattttccttttttacttcataatacggactgcccatagcctcagcctgcttccggatcacctgggctgcctccggattatttccgtcatagatcacaggcactcccggtacaatgatccctgccttttctcctgcaatctctgcaatggtattccccagatactgcatatggtcaaagctgatggatgtgatcacacaggcaacgggatcctccactgctgttgtggcgtccagacgtcctcccagtccggtttccagcatgacataatccacacctgcctcggcaaagatcaccattcccataagaaacagcatctcaaaatacgtgggatggtaacttccctctgccacaagctcgtctgcaagagcctttaccttttcaaatgcgctcataaacgcctggttatcaatattcttctcattgatctgaaagcgttcattgatcacaaccaggtgtggagaggtaaaaagtccacaggaatatcccgcctctctgaaaatggaagtcagaaaagcacaggtacttccttttccattggttcctgccacatgaatgactttaaactttttttccggatttcccagacgctccagacactcttttgtatgggagagtttgttttttgttgtaaactttggagtttcttcaatataagcaaccgcttcttcgtaattcataaaaaaattcaccacttcatctaatgttttcgcagcggcatcagaggctgtctctgatataccgctacgatatcattatatatgagtggtgaaatatgtccagtaccaatcgtaatcttttattcggcaggatcagttatcttccgtcggcagtttccatttattttcatcaaacagcatatagcaggaacggtcatagctcttgctcagcgcctttcgggttgagctgttgcttcgctgcaccacagaaagcctgtcgaaatcttccagctctgtgccggagatcatcagtgttgtgggattcacataaatggtatcgtgccattctccattcagttttacctgactggacggcgtaaaattggttcccgtgatccggtaggtatgatcccaggctgataccagggaaactccgtccagcgtcacatcataaagtccgagacgcatctttgtccttttgaacggattttctccctcataggaatgctgctccccataaagcaggtcatactgaagagtttccagatccacctgataattctttgtatttcttcttgcctggtgataacggaaaacagttccctcatggattcccacacggtccagaacctctgccgccatctgataagccgcaaggttcacgtcttttttctcaagaccgaagttgtcccacataacatactgtgtctggaaaagatatttattgtccacatcctccacagtcagacccatagtaggaagatgatctccatacataacaagaacaacatcctccggataatcttcaagcctgtctgtaagctctttgacaaaattatccatctcatggatctggttcacatagtactcccactggttattcttggaagcagtaggagaaccggtcacagtgatttcatgctcttcaagctccggttcctccgggtaggctccgtgtccctgcacagagatggtataaacataatccggctgatcctctgtggaatccaggcatttcaggatctcatctgtaagaacccggtctcttgtccagcccagcgggtttttatcatcctcctcaggcatatactctgcagaggtaaaagtgtcaaatcccagattcgggaaaatacttcttcttccgtagaaattcgcctcattgttatgtatggcatgactggaatatcccagctctccaagaacatacggagcgctttcacaggttgtctccttcagaatactcttataaggatattctcccggtccgaaataccgaaggctcatgcctgtaatggactcaaactctgtatttgccgtacctgcgcctacagaaggcactttataatatccggaggtatactccttcatcagcttgcggaagttaggtatgggatcttcggatatctccagataatttacaagctccggatcaaagaaagattccagctgcaggaaaataatgttgggatattctccctctctggtttccggcaggttctcctcggttttttcaatccttttgatttctttttccgagtaatctctcggacagctgattccggtatcaaagatcgtaaccccgagacagtaaggatatccgtaatcctcataggcaaaggctatgtttccaaaataattggacagcactcttttttccagcgcaagctgtgtcactccggcaaaaagcacaaatccggcaagtaccagaggaatattccagcggtatttcagctttcctttaaacttcggtcctttgacgatcagcgccagaagcgtcagtgcaaaaagccccagtacgatcagtgccacaatcactccccatttgggaagatatttttccagaagagccattccatctgtcagaagatgaagatccggtccggtaaacggtgtaacacgggtagccaggatcacaccgtttatgattccaagaagaagccagaacatcaccagcagcacacggataaagcatcttcttctgaacaggtatacaatcagagaagatgtgaagatcagagccgcattgtaggcaaacaccagtggcctgcctgtcataaaatcccatgcctcagtaaaggaatgtctgctgatcgcctcaatcagaaaatatcctgctgcactgaccagtgcatgaagcagcagagaaatcctgttacatatatcataccatttcatcttaacgctcctttatcacttttgcatctgtgaaagctgtacgtttaccttttccatcatttcttcgtatttctgaagtttttctttttctgcgtctacctttgcagcaggcgctttatttacaaaattcgggttattcagcataccctggcagcgggcgatctcttttgtgagacgctcctgctcttttgtaagacgctcgatttccttttctctgtcaaccagatcttccagaggcagataaacaactgcgtcagaaaccactacggaaactgcatcctcgccaattccctcctttgtttcctgaacctgtatttctttagagaaggcaaggtttacaaaggatcttttgcaggcctcataacgggcgcaggtatctgcatctcttcccacaatataaaggctggtcttgcggtttaccggaacattcatttctgtacgggtattacggatgcctcttaccgcctccttaaagccctcaactgccttttctgcctccgggaagcttctctcttctgtgtataccggccactgggagatcataatagaatcctcttccggcagaagagtacagtaaatttcctcagtgataaacggcatgaacggatgaagcagcttcagaccttcggtaagaactgtacgaagtgtccacagagcctctccggctgcctttggatcttcctctgccttccacagacgaacctttgccatctcaatgtaccagtcacagagctcatcccacaggaagtcataaaccttctgaacagcaataccaagctcatatttttccatgttttctgttacttcacggactactgtattcagtctggaaagaatccactgatcctccatgcacagctccttcaggttctcaggagcagagactgttctgccttccagattcatcatgataaatctggatgcattccagatcttatttgcaaagttacggctggattctactctctcccagtagaaacgcatgtcatttcccggagcatttccggtgatcagtgtcagacgaagagcatcggctccgtatttgtcaattacttcaagagggtcgataccgtttccaagagacttgctcatttttcttccctgagaatcccttacaaggccgtggatcagaacgtggtggaaaggcgcctttccggtctgctccatagcagaaaataccatacggataacccagaagaaaataatgtcatagcctgtcacaagcacgtctgtaggatagaaatattccatttcctccgttttgtccggccatcccaaagtagagaacggccacagtgcggagctgaaccaggtatccagagtatcctcatcctgatgaaaatgagtgcatccgcatttcggacatttttccggcatctcacgggcaacaaccacctcgccgcactcatcacagtagtaagccgggattctgtgtccccaccaaagctgacgggaaatacaccagtcacggatattttccagccagtgaagataggttttgccaaagcttgcaggaacaaattccagctcgcccttattgagaacgtcaatagcagcttttgccatctcgtccatacgaacgaaccactgaggcttgatcataggctctaccgtagtgccgcagcggtcatgagttccaacgctgtgggaatggggaactaccttcaccagaagtccctgtgcctcaagatctgccaccattgccttacgcgcttcataacggtccattcccgcatacttgccgccaagagaattgatggtagcgtcgtcattcatgatattgatctcaggaaggttgtgacgttttccaacctcaaagtcgttagggtcatgggcaggtgtgatcttcacgcagcctgttccaaattctttatccacatactcgtctgccacaaccggaatttcacggtctgtgagaggcagcttcagcatttttccaaccagatccttatatctctcgtcatcaggatttaccgctactgcagtatctcccagaagtgtttccggacgggtggtggcaatctccacaaagcgtccctcttctccaacgataggataattgatgtgccagaaaaatccgtcctgatcctcatgctctacctctgcatcggaaatagaagtctggcataccggacaccagttgatgatcctggagcctttgtagatatagcctttttcataaagcttgataaacacttcctgaactgccttggagcagccctcgtccatggtaaagcgttctctttcccagtctgcagatgcgccgagctttttcagctggttgatgatctttccgccgtactcttccttccatgcccaggcatgttttaaaaattcctcgcggccgatctcgtgcttgtcaattccttcttttttcagcttgtcaataaccttgacctctgtggcgattgccgcatggtcagttccaggctgccacagcgcctcatagccctgcattctcttaaaacgaatcagaatatcctgcatggtctcgtccagagcgtgtcccatgtgaagctgtccggtaacattgggcggcggcatcacaatggtaaagggttttttatctggatttacttttgcatggaaataaccattatccatccattttttgtacagacgctcttccagtcctttcggatcgtacgtctttgcaagttctttgctcataataaacctcctgtatgtgttttctgtaaatagtgaggggaaaaatcgttatcatttacctggaagatcagtacagaacatactgcctttccggtaaataaagaagcccctcacacctaagtgtgaagggcgaatcttgtcgcggtaccaccttcattatgcaggaaacagtcagtttatcacacttatttctctgcacatctcattttcctttaacgcaggatttacgtgaaagcctgctgccggtttctgtacttcatttccggccatcagcctcccggctccaaagctaccttctgctgcgtccttctgagaatatcttccagccagcggatattcctctctgtcagggtattcagcatactcctcttcttcctcgcctttgttatggtacatactataattacattttttacggttgtcaagacggaatacagaaatttcacagatatttcaacaactggttactgttccccaccttcacagccgactggtcaaaatacattccaaatcacccccagggacaatatcctgccctgtatatcccgggattttgacgtatatatgccaaagcacctcacaggacagtgatccctgatctgtaactccttttactctactgatttcagagattctaccatgtcgatctttgtcagcttcctgtgcataaaccagtttacgatcatggaaaaaatgcaggttatcacagcacagtacaaaaagcttacaggacggatatcccgcccgaacattactgcgtccacctcaaccgttacaataatatatctgtgaagcagaactccgaatcccgagccaaaaataatccccgcaatagtcagaaaaatgttttctctcagtacgtactgggaaacctccttatcataaaatcccagaaccttcaaagttgccagctctctctgcctctccgtaatattaatattattcagattatacaaaactacaaatgcaagcattcctgccgaaacgatcagtactacaataacaatccccaatgtgctgagcattcgttccacctgggcagccagactggaggtatagctgatactgagggctcccggctgttcaatgatctcttttccgatttcctctgcctgctccagatattcatcctttacagaaaatacaacatcctgataatccggtttttccccaaaggtctgttcatataccttgggagtcatatagatgtagtgtcccatgtagttttctgtgatcacagcgacctttgcctgaaactcttcgttttcccgctccagggtaatggtatctcccacctgaagatccagaagcttcgctgtcttttcactgatcaccgcaccctcgtcagtcagctcatagacctctcctgtaagacggtttctcagtgtcacatcctcccggaagttttccatattttccggtacatagagataaacactgatattggatttcccgttgggagctgtaatcttactgaactgaatgtttgtaaaccgttccagtttttcatttttgtccagatattccatcagcttctctctgtcttcatcagaagcgtcctcatccgtaataatagttccgtcatagtgctgaagctcagaatactgtttcaccacaatatctgaaatagaatcccggatgccaaagcctaccagcatcagcgccatacttccggaaataccgaatattgtcataaacagacgctttttgtagcggaaaagatttctgaggcttgacttccaggtaaaattcagatgtttccacaaaatcgtgattttttctaccagaactcttttgccctcttttggcgccggcggacgcataagagaagccggtgtctcagaaagtacccgataacaggaaataacagtagcgccaactgtacagacaattgcagcaactgaagccgtcagggcaaatttcagctcataatgaatctgaaggctgtctcctacattgtggtacataattccataggctttgatgattatatatggaagaattttttcaccgatcagaacgcctgcagcgcttcctcctactgtggcaagaaacgcatagttcagatatttggacgcaatagaaaacttcccgtagcccagggccttcagcgttccgatctgagtcctctgttcctctaccattcgtgtcatggtagtaagactgatcagggctgccacaaggaaaaagatcacagggaaaacctctcctatacttttgatcctgtctgcattgtctccgtaatcagaatattccggaagatcgtttcggtctgtgacgatccattcaggttcttcgatctctgaaatttcctttctggcgtcttctatcttctgcccgccttccgcaatttcatcctctgcctcttttttgccgtcctcgtattccttccagccatctttcagcttttgctccgcttcttttaaatccttttctgcatctgcaagcttctgtctgttctctctgagttcagcctctccatctgttattttctgctggctggtctcaatctcctgctcaccggaattcagcttctgctcgtttgcttcgatttctccctgagcagagttcagcttttgtctgtttgcgtcgatttccgcctgaccgctgtttaaatctgccagactttcctgaagcttcttttcatttgcggtcagcttcttttcgtttgcggcaatctgtttttttgcaggctccagcttcgcctcttcctgtttcagcgtttccctgccggcatcaatcgccttctgggcttcttttaaagactcaatggtctgtgtcagctctgcttttttcgtttctgcctgagtaagtccattgcggacagccgcaagaccggcttccagctccggcttctttgctgctgccgctgtacaggtatccaacactacctgtgcctgagagacagctccattggctgcattcagttccccgcgggctgtttccagatttccctgagctgcttccagatttcctcttgctgtttccactgctgtctgataggaagcaagttcttcttctgtaatctctccggcttcaaatcttcggacagcctcttccagagccgcctgggctgtgtcaaaaccggcctgcgcttcactgaccgctgactgagccgcatcaaaagcggcctgtttttctgccgcagtacgctgagcagcttccagagcctgtgtcagcgcctgaatctgcgcctctgcctcttccgcctgacggattccttcttcaagctgagaaatctgatcctgaagctgcgcaatctgaccttcaacagcctgaattcccttttcggcctgagcaagaccggtatccagctgatcctgcttttcatccagagcagctttgctctcctctattttctgttgtccgtctgcaagctgcttctttgcctgatttaactggctgcgtccctcctgaagctgttttttaccgctgttatactgactccagccatctgacagcttttcctgagcttcatttagctggctccagccgtctgcggcctgctgcttggctgctgcaagctggtctcttccctctgccagagtctcctttgcagaggcaagctgctctttgccgtcggagatttccttttccccgtctgaaagctgttttttaccgtcctcgtattcctttttgccgtctgaatactctttttcaccgtcttcaagctctttccgggcgtctgcaagttcttcctccgcttcctttttaccgtctgaaagctccttctctgcatctgcaagctctttttccgcctcagtcatcacatcctcatatctgatctgacaacgttccgcctgaattccctccaccttgtcctgaagcttctcaataagccggtcataggcatctgtgtagctggtcacctgatccacaccatgagctctgatatagatctgggtaaaaacctcctggtcaaaatcctcaggcagcacatagacaaatccgtttacctcgccggatcccagggttgtatttcctctgttaaaggatatgtaaagaggggatctgccaagtccggtgacggtatatgttttctttttcagaaaaggatcctctgtatcctctcttaattcaatctgatctccgatctgatatccctgcgcttctgcaaactccacatccagaaaacattctccgcttttttccggaagctgtccctctgctactgtaagagtgtttacatcctcgttgacagcctccacatggagaaccttctgagcctcagcctccccgcacagcacgtcggttgaccaggctccctcagcccattctactccttcaactttgcggacagcctctacatcctcctccgtcagtcccagagtgcccatcaccttcagatccatcattttgctttctgtataataagcatccccggaaagtctcatatcaggggagcttgcctggattcctgaaaaaaacgcaactccaagggcaacaatacagaaaatagaaataaaacgcgcctttgtttttcttatttccacccagaaatctttatgcagtgccttcttcatcgcgctcacctaccattcgatttcttctaccggagtaggagcatcattctgaaccatagaagatacttttccgtttttgatcttgatcaccctgtccgccataggagtaagggcagagttatgagtaatcacaattactgtcattcctctttcccggcacatatcctgcaaaagcttcaggattgcttttccggtctgataatccagcgcgcctgtaggctcgtcacagagaagaagcttcggattcttggcaagagccctggctatcgacactctctgttgctcgcctcctgaaagctgcgcaggaaaattccccagtctgtccttcagccccacatcttccagaactgttgccgcatccagcggttctttacagatctgaagagccagttctacattttccagagctgtaagattgggcaccagattataaaactgaaatacaaaaccaatatcctctctccgatacccggtaagctgtctgctggaatatttggcaatatccacaccgtctaccagcacatgtccggaggttgccttatccataccgcccagaatgttcagcacagtagtctttcctgctccgcttggacctacgactaccacaaactcacccttattgatctcaaaactgatgtgatccactgcaacaatctttacttccccggagccataaacctttgacacattttcaagctttacatatgcatgatcctgacgctccattctcatcgcctgccttctgttgtatgataaaaaagaaacccctgcctgagagatttcttttttgtttgcatttagtataacagttttaaaatatttcttcaatcaacagcggtccaaaaagatataaaaaatgtataaactgctgttgttcacacagcactgtcccacggggtgtttgggcatgtatctaccaaaatctcaagatatacagggcaaaacgccatcaccaaaggtgctttgccttccggtaacagctgcattatttacccagactgcttccgttaaagctcagaggaagcagttccttcagaagatagattttataatcctctgtactttttgctacaattacctgaaatgtatccggatcacaaaattcagccattacctgacggcagataccgcagggcgcgcagtaatcaaattcctctttttcctgcgattttcccacaatggctatggcgcagaactcctttttctcttcataaactgcccggaacagagctgtccgctccgcgcagttgcaggctccataggaagcattttcaatgttgcagcctccgtaaatacttccgtctctgcacaaaagcgccgcccctacctgaaaatgcgaatagggagcatacgcccgtttctgtgatgcaaatgcttctccgatcagtttgacagcctgctgctgtgataacctgtctgtgttcataaaccgtacctccattgtaagttcagctcagtttcttatccagctcttccctcagtttttgtttcatttcctctaattcctgctctgaaggacgattttcctcactgtacattttttccataggataccaccataccgatccttttccgttgcttccatactgctccagatctccggctattcgcggaaacaaatgccagtgaaggtgtgtatcaccatttcccaacagctcataattcattttttccgctccaaaagcactagaaaccgcctccgcaaccagagacatttcttctaaaaactgaatctttactttgtcttccagttgaaatagctctgttttatgcttcttgcataaaaataacgtataccctttaaaatgttgatgatcaccgattacaacatatcctgttttcagttcttttacaaagtacgggttcctgtcttcttttatcatttttattctgtcacaaatcagacacatggggttctcctttctttgttcagatgatttttatttctgtcagttgtttcctgtatcctccgcagaaatacacaccttaaaaaactttgccatcagaggaatatacgttattataaaaacagagccgctaagcgcataaaacatttttttcttctcttctgggatcttcattcccgccatcagccccatagaaaaaaggcagaacttaacaagagcaagtgttttccaggtactttccttacaatattggtctgcaattttaaataacttcataaaatattcatgcctcctttttacatataacctgatacttcatcttattgatctcgctcccttctgtcccgcttaataagtaacaggacaaaaagtacaaaccatgctccccaagcaatcagacatcccaggccagctttccacagatcaattgcgattcccaccagaaaaggaacagccatccccatcatatgttttccatatgacttacacatattttcttcatcatactttcctgatttgacgctgtatccagacaaatattttgcggctcttccattggatttataaaaccataagccaaagccaaatgtaatacatgccatacttaaatcaaatatgatataaaacaacatttttccctcctattctcacaacatctgttttacaccttcggtcgatatctgagatccgacaccgtatacacagtaataaacgcctccggatctttatggttcatgtaatccataagcttctggtactcacctttatccacaattgtgataatttcatttcgtttttccatattataagcgcccacagcctcgtaaatcgttgccccgctgtgcagattatgaagaataaaatctctgagttccttttcatgctttgtaataatacagactctccgcttgatattctgtccaaaaataaagtgatccagaagaagtccgttaaaataggtaccaagaacgctgagaacaacagactttttatcatacacaagcgctgcagaaagagctatgcacatcccggaaagcgatatggcctttccaagctccatatgcagatatttattcataatctttgccacaatatccagtcccccggaggatgcattccggttaaaaagaatactgcagcctgcgctcgcagccagaatgtagcagactacatccagctcctggcttccggtcatggactgataagccggaaaagctttttcatacactcccagaaaaacaggaagcataatgcttgtatatatagtttttactccaaattcttttccacaggtcagaaaaccaataatcagaagcatcacattcataatcatggtaattgcggaaagaggcagcggtacaaaattagacagtataattcccagtccggagatgctgcttactgatgttttgcttggcaccagaaaaaagtaaactgctgctgagattactgccatagctcctgtaagaataacaatttctttcagcagttccgtataatttattttctgtttcatgataaagtctcactttctgtcaggttttgtctcttattgattttctgaaatcatactgtacgataatctgattatctccaaaacctttttcttttttattagatgataaataacattttataaacacttcatcatccagtacgcatctgcatatgtgccatctgaatatttcatattatttggaaagtatttttctctttcctgttggcttctgctgtcacttaactgtttttctgccacaatcagatagcggtggattgttccctgaatttctccattcttttccaatattttctgcatttcaactaatttttcaaagcagcattctactgaaaaaccaggaaattcccactgaataatgcgcgcaaaccacacaaaagcaccaacatcataaaataaaattggtctatacgcttcttttgcacatatagtacggaacccagcctcctcaaatatttttttctgctctttcaaattcatatgtggaaaaggtggctgagttccaggaagaaccatttctactaaatctctgtcattgtctcctccaacctgttctgtaataaacattcctttgttctttaaaagacgatatgtttcctgtacattaaaatccccatgtcggttaataatcatgtcaaagctttgatcctcaaaagggatattagcaggatcactgcactccttaaactgaatccccaaaggaagaagtctttcctgacatatctgtacattaggtttatatccctctgttgctgacgtattattacagggatgtcccaatgacagtaaaaattcgcctccccctgtatcataatctaaaagattaaaagaatccttcagatatgattttataattttttcataatcccatggcagatcattctcttcctcatatcgcccattaatatgagaaaaatcccatccatgaatatgggcagcttcctcttcctttttccatatttctctcaatttcagttcatccatctgattttttcctttctatacatcacaatccttcctaagaaactgtttcagatattcttccactgaccgggtcatttcttttgaaaaatcagaattatatttacggccgcaaaaagctgcagtccagtcctcaaaacttttctgtccgcagcggccttcaaacatatttcgaagttcttctccgtccatactgcggtatgtattttcatgtacaatgtgcttctgttcaaaccgtactggttttggtctgtgtttctgctgctctgttggccatccaaacaccagcatcacagccggaaaaacatattccggaagcttcagaagtctgcgctgttcctcacagttttccataatatcacctatatagcaggaaccaataccaaagctttccgccgccacaactgcattttgcgctgcaatcgccgcatctgttactgccagcataagatccccggctccaggttttcggggtgtacacccggcttccagatatgtgtcataccattttttacagtccgcacaaaataccagaaccattggcgcttttgcaataaacggctgattatcacaggtctctgataatgctacctttaactctttatccgtaatatccagaattgtataaagctgctgacatcctgcactgggagcctgtgcagcagcctccagaattattctcttcatttcctcaggaatcgttctttcctcataaaccctcatggattttcgtttgtacaagctttcaataatttcgttcattttttccccttttctgctgcaaaaatcattctgatacaccaagtactaaataacaataaccattatatcaacctgcatttggagcaatggttctacgccaatatggcagaagcttaatattcgttacaccagcttctttctcaaatataccatgtcctttaactgaatacccgcttcataaattggatggtcataattatcagtaaaaaaattttccaccacatgagaacgtgaaaatccgcacttttcataaaacggaaccgttaaaggactgtctcctgttcctgcctgcaaaacagaatatttcccctgatatttgctgctaataaaatcaatcagagctttgccatatccccttctctgactgtccggatcagtggctatatttttgatctcaagaattccattcccctcatctgtaaccacacattccgcctttatccccttatcatccagcacatacatcgttccatgttccagataacgatccaccatattttcctgctcatccgccagcaacaaaagagaaagatactgctttttatttctcttcacttctttgatttccatactgctttctttatcttctcctgtccgaaaattcttctgtttatcgtcttatatttttacatttttctgttttcagaatatcacagaacagacttacttacaatgaaaaaaaggactccctcttcccaggaatcctctttactgcttctgttcaccacgtttccggtaattacctgtgaacagctgctttctgctttcttatttttcttgtttttttctgcgggtcatcagtccgccaatccgcccggtttcctttgccgaaaggcttttccatccattttccagcacctggtccagaagtcccagttctccggcgatctcatatttcagcttttcctcttcaggaagttctcccttcagatagctttccacttccttatctttattcaatgttctcacactccttatctgtattcatcaggagtattgacactttcaggaaaggttatacttcaatattctcaaatatctcttccagtttcatggtgatattaggaaactctctcagatagatcacagtgtctgcattataatatatatcttctggatcatcctgcaaaatataactgtatttcagaatataattgtcctgttccagataataaatctctactgccctttcttttggggatacgatccagtattccgaaactcctgctgcctgataaatttcttttttcactgttttgtctttcagggctgtagcaggacttagggtttccgcaataaaacggggtactcctgtgtaggctcctcctttcaggtgttttctgtcacagataagcataacatccgggattacgtaatcattatttttttcaggctggtatctgtaatccagattttccataaaagaaagacataaactgtttttcagatgctgcttcagtattgcatgaatattgctgtttacaattccatggcgatagtctgcagagggagacatatcataaactatcccgtttattctttcttcttttctgtagtcttcttttaattctgccatatttttctcccctttcacacttaatcagcttttttattatcatatcaatttatctttcttcgtacaagcaatatttccttatgatttacattcttcacaataacaattacacgttctttcatataaaaaatcctgccagactgctccgttccccaaattggatttacagggttggttcagactgacaggatttttctctattatttatcctctcggaataataattgcagctatgatatatgcccagattcccgcgccgccgaaacaggtaaggattacccatgcaagacgcaccagcgtgggatcaatgtcaaaatattctgcaatgccgccgcagactccgcagagcatacagtttactgaagatttataaagacgtttgttgctcatatttttacttcctttctgtaggttcctgcataccggacccactgaaaactgattgtcgttttacaggctctgtcccggaaatcattcagtaaagcttacttccagggttcccataccgcactccagctgcattttgcgggcagcgccatcattatctactattttgcttccgcccagaccggcaaattcctcgtcttccaggctgagtgttcctgcgccacaggaaaggcggtaattataatctgtttttttgcctgctgcttcaagctccatagttccgattccacattctgcctcaatgtattccgcatcaaggtctgtaagagacaatgttcctactccaacctcaacatctgcttctctggctgtaatcgctccatagttttccagggttcctgcacctaccgatacactgaattcccgtgtgttcagattattctccagagttgctgttcccgcctccacatcaatatttacctctgtaaattccattcctgcaggatagcgaacaaccacctgtctttcctcaggctttgtttttcctttgctttcaattttcagctctgtaccttctgtagtgacccttactttatctgtatagtctcctgaaatactgacttttacatttttaccgtcatattcctgaaggatcagttcatcataattaagttcaatgtccatggaggaaatattttctagctcatatgttccgtctttacctgccggagctatatcttcaatttcccagtcgtcatcatcccaatcatcatggtcgtcccagtcatcatcgtcccagtcgtcatggtcattcaggctttccgcaactcttaccatacgattcacaaccttctgaacagaactgccctcatatctcatatcgtccatggttgctcccatggcaactccgcctgcggtaagtcctaatcctgcaactccaagaactgctgccgcgcctaaaacaatttttgaaaattttctcatacctgattacctcctttttctctgtggatcaatccgctgcaaaaatctgtaaacttattcaacagtctgggtaaaagtctgctgagcacccagacaataaaaaccagtcccacaagccctatggctgtaacaatgcttccgagtccgacagcaaaaattccaaccggcgctgcgctgaagcaaagtccgattccggcaaacactgtaacgattccgccaaccagcagtccgattactccggcaccaattccaaatgccaggataaagggtaaaaggatgatggttacaataaatccgaccacacctcctatggctcctgacagaaacggtgaaaggaacaccagaagaatcagtaccagaatcatcatcccactgccccgtttctccctggggcggtaacctctgtcttttctgccggctgtccgctctcccggaacctgtcccggctcttctgttctttcatcatagtatcctttttctgtgtatgttccggcagaatcgctgttttctctcagatctgccttgataatggctgctaccttacctgggcttccaagcttctgtatcacagaagcctcttctgcttctcccgcctcatcaaaataactttcataatagtcaagagcctctcttctctcatcctctgagatatcagagaggagcttttccagctggtccataaattcttttctgttcataaatcaattcccccctcaaacagcctggaaatttttgaagaatagtttttccattccactttatataaattcagctgtgcagatcctttttccgtcagtttatagtatctgcggtttcttccttcatatgccatatcataggtttccagacattcatccttttgcagccgtctcagcaccggataaagtgtggattccgaaacatccagaacactgcgtacgtcctgagtaatcttatacccataggttccgtcctgttcctttgatacaatagccagaacaatggcatccagaagggctgcgcctgtattaaataccatgggctcactccttttttgatttctgtataatattatatcaatcatcaatattgttttgttaataatactatatattatataatatagttttgtcaatagtatctactaaaaatttccggataaaacacagaacttttattccgcttttctcatctaacaattatcataatctgaaacttcattcaactatatttcggaaacagccctgtaaccaaacattctctttgctgacgaccgttactccgacatatagaaaagctccctgtgtgatctgcacaccaggagctttcctctgatttttattattgatttttatctgtaataaacagaattccatttcagttcatttttaaagctgcggatcgttgtatcgttatcaatatatacagcttcaattcccattgcatttgcccagtctcccatctgttcggcagtaagatcataagaaaatgccgtatgatgagcgccgcctgccagaatccacgcttccgcgcctgtggtaagatccggtctcggagtccagaatgcagatgccaccggaagttcaggcatggatttttctgtacgcttacaatccacttcattaataataagtcggaagcgatttcccagatccacaagagaggttgcaatagccgggccttcctttgcttcaaataccaaccgcgccggatcctcacggtctcccatggaaagaggtttcacgcggatgctgacaggtccctctgcaatggtagggcacacctccagcatatgtgactgtaaaattccttcttttcccggaacaaggttatacgtatagtcttccataaaggaggttcctttcgcaccaggaacgttctgagtcatgatcttcatcagacggaccatggcagcggttttccagtctccctctgcgccaaatccatagcctttttccatcagacgctggattgcaaggccgggaagctgctgcagacatcccagatctccaaaatgagtaacaatagcctgatagttcttttcttccaggaatcgctcgaatccaagctcgatctgagcctgtaccgccacatgtttccggaattccttttcgtctcttccttctgtgatgatacggtacttatcatagtattcttctaccagaacatccgtatctgccctggaaacagcatttaccgcctcggcaatttcattaaccggataggcgtcgatctcccatccgaatttaatctgagcttcaaccttatcgccttctgttaccgcaacatttctcatgttatctgcgattctcataacacggatatggctgctttccataatgcctactgccgtccgcatccatgaagcaatgcgttcctgtactctgctgtcattccagtgtcctactataattttccgctcaattcccattctggtaacaatatgaccaaactcgcggtcgccatgagcggactgattttcattcataaagtccatgtcaatggtatcatacggaatttcttcattaaactgtgtatgtaaatgaagaagaggctttctgtattcctgaagacccaatatccaggactttgccggagaaaaggtatgcatccaggtgatcacgcccgcacactcttcatctgcgtttgcctcattaaaagtacagcggatcacttcgtttgtgatcatggtaggtttccatactacttcatagggaagaatgcctgattcatttaatttttctacaataattctggaatgctctgccacctttttcagacattcatccccataaagatcctgagagcctgtggcaaaccagaatttataatttttttgtgttttcatggtcatgttctccttatatttgattactgttccgcacaccggcaaacagaccgccgctctttcagagaaacaggaaactcatatgttacatcacatcccggctcttttatcagccgaagaatagcctctgccgcacggcttcccagttcttccatgggatgacctatacttgtcaggggaaccggattcagttttgccagttcggaattatcaataccgattatggaaatatcctccgggattttttttcctgtttttaaaaggcatcttgtcagttcatgcgctacttcatcattgtagcagacgcaggccgtacatccggaaagccggtatttcagtttttccatgatcctggaaaaatctttcatttccagtgtatcgatccacgtcactctgctttcctccacttcaatccctgcatggcccagcgctttcagatagccgagataacgtcttcttccctgaccgtcgtctgttttaaaaattcctccgatcctggtgtgacctttttcaatcagatactctgttgcagctctgcctgtctgtacatcattcatactgatatgaggaatatccagattttcatagaaactgttgaaaaacagaattggaattcctcttgccaaaagtcttcgataaaacttcaggttcggattgggaagaccgctcataaccggttctgcgatcagcggatcacggcttccctcatccagcattcgttccagaagtctccgctctgtttcaatacggttgcccgtaaacataatgcgcgcactgtagccttccttttccagtcgttctaccatcgcctgcaggattctgggaaaaatatatccatccacataggtggtcagaatatccactgtatgagacagcatcttcttttcttcctgctctgcctgttcatcccgcacaaaggttccgcttccctgaatacgtgtcagtatcccctgctgctccagaaggccaagtgcatggcgtaccgtctgacggctaataccaaacgtacggctgatatcattttctgattcgatctgatctccccggttcagctctccggttgctattctgttttgaatccattccgtcacctgacggtacttagcaatacccatattttataccagattaattctttttcttctttgttgttacgtcaagtacaactgctcccagaagtaccgcaccttttacaaccttctgaaggtctgttgacataccgcacatggacataccgttgttcaaaacacccattaccagagcaccgacaacagcgccgatgatcgtaccaactccgccggatgcagcagcgccgccgatataacaggaagcaatcgcatccatttcaataccatcgcccattttcgggtttgcgccgccctgacgtgcggataatacgatacctgcaagagctgcaagaacgcccatatttacatatacccagaaaaatacatgtcttgtgttgataccggaaagtcttgccgcctttgcgtttcctcccattgcataaatctgacggcctgcaacagttctgcttgtaataaaatgatatactgcaactacaacaccaagaacgatcaactggatcggaataccgttatactgtcccagttttataaagaagaaccacacgatcagaaggatcacaacatcttttactgccatctgccatggaacaatatttgcaaatccatatttgttatttgttttaattgtgttcagctcagtcagaatgagacacacagtaacaacagcagccacacctacgcacacaagatccagtgtgcctcccgcaaagtcgatcttgatggttggaagaaatcctgttccgataaatgcataatcctgcggaagaggacctacagtaagagattttaaaagcgtatatgtaagaccacggcccataagcattgtagccagagttactacaaacggagggatatccagatatgcaataaagaatccggaaaaaacaccaactccaagtccgatggcaatagctaccagccatgcaagagctaccggccactgctgctctacaacaagctttgcagcgcaggcagcgccaagagctactacagaaccaacgcccagatcgatatatccggtcagtacgcacagcagcataccggttgcaaggataataatgtaaccattctgcatgatcaggttgttaatattggtgggcgtcgcatttgctccgcctgtaagtacataaaaaatagcaaaaataacaacaagtgctacaatcattccaagggatttcaaatccagatttacatattttttcttagtatctgttcccattactcttctcctttcgcattactgtccataatgcacttcataatgctttcctgactgagttcagcgtgactgagctctcctgctatacggccttcattgataatgtaagcacggtcacaggtaccgataatctcctgcatctcagaggaaattacgatcacagccttaccggcgcgggccatatcattaatagcgcagtagatttcatattttgcgcctacatcaatacctcgggtcggctcatccagtatcagaacatccggctgcgtcatcatccattttgcaagaacaactttctgctgatttcctcctgacagagatcccactgtctgatgaatagaagttgcttttacattaatttttttcttatattcttccgcttccagattttctttccgttcattaacaatggctccgttagaatagtaattgcgtaatgcagccattgtcatatttgttttaatgtcatcaatcagtaccagtccgtaagtttttcgatcctctgaagtgtacgcgatcttattattgattgcgtctttcactgtttttgtactgaccttttttccgtgcatataaacttctccggaaattttctgaccgtaggaatgaccgaataagctcatggcaaattctgttcgtcctgctcccatcagtcctgcaagtcccactacctcacctgcccggactttgatattgatatttttgagaatctgcatctccggaatttccggatgatatgcattccagtttttcacttccagaaccacatcgccgataggacaattatcgcggaccggataacggttattcatttcacgaccaaccattcctttaatgattctgtcctctgtccactcatccactccctttttcagggtttcaatagtttttccgtctcgaatgattgtaatggcatctgcaacatagctgatctcattaagcttgtgggaaatgataatgcaggtaacgccttttttcttcagttccagcatgatttccagaagctgagcggattcctcatcattgagagccgctgtaggctcgtccagtatcagaagatctacattttttgccattgccttggcaatctcgatcagctgctgttttccaacgcccagtgtattcacaggggcattgagattttcattttcaaggcccacatgagccagggcctcctttgcttctcctctggtctttgtccagtcaatcacacctttcatggaaacacgttcatttcccataaaaacattttccgcaatagacaaatacggactcagcgcaagttcctgatggataataacaattcctttattctcactgtccttgatcttatggaacttacatgtctcgcctttataaataatgtctccctcgtatgaaccataaggatatacgccggaaagaacattcatcagggtcgatttgccggctccgttctcaccacataacgcatgaatttctcccttcttaacctgaaggtttacatcgtccagagcctttacaccggaaaatgcttttgttatgtgcctcatttccaaaataacttcagacatgtctttccctctctcctttactttttatgaaaagaggcagcggattcttccgccgcctctctgaatttcatattcagcctgatccattatttcagctgatcttctgtgtagtatccgccatcgatcaggatttctttatagttggactgatctactgcaacaggtgtgcacatgtaggtcggaactaccatttttccgttgtcatactgctctgtatcattgatctccggctcttcgcctttcagaactgcgtctaccatggtaactgctttttcagcaaggagacgggtatctttgtaaatagacattgtctgtgtaccgtcgataatattcttggtagccatgacttctgcatcctgtcctgtgatcagaggccagttttcttctgtatatccggcacccagaagagctgctttgattccatatgcaaatccgtcaaatgcagagcatgcaatatcaagatcttcgtctgcatagtttgctgtcagaatgttttcacagtttgcctgagctgtttcctgagaccatctgaggatacatgtatcttcaaaagatgttcttcctgatttacatacaagtgttccatcatccagatactcctggagaacttccataataccgttgtacaggaacagcgcattgttgtcatccggtgatcccataaagaattcaattgtataggactctcctgcctcgcgggctgcgtccagatccttggtatctttaatataattaccaataacagtaccaacgcctttgttgtcaaaggttgcataataagaaacagcatctgtatccataaggagacggtcatatgcaataataggaatacctgcttcttttgcctgagcctctgcatttacaagcacaccggagtcaattgctgcgataacaagacagtcaacacccttgcccacatagttttcaagctgggacacctgcattgcagtgtcatcttctgcatactgaagctctactttgtagcctttttcttcaagctgttttttcatgtttgcgccatcgttgatccatctctctgatgactgggttggcatcagaataccaactgtcttctgctcttctgctgacactgtggttgcagaagctgctcccatagagcataccattgctgctgcaagtgctgtactgactaactttctgttcattttgtttcctccctgttcatacttgtacaaattatctgtaacttgtacagtttttgtgttacatcctgtacaaacacatcattgcttttgtgtgttttgtacatttatgtatcacttgttacgtttaactgtgagcacattgtatacccacccccgcatatttgtcaagtattttttatatacatctgtattttatgtatattttgcacataaatttgtatgtacatttagtacttttgccagtcactcatgtatacatcttttccattcaactggcaagccaaaaatcaggcaggcaaatatcatcaccaaaagtagtttggaatgcattttgaccaacttaccgaaaacagagtacacagtaactgaactccagagtattgccataatatccctgatccgtacttgatttttaaaagatcaaaaattataatcaggaatacagatgccaaaaatcactatatatgatatgattaagtaactgttcacaggccactgctgtaagcctgatgaactgtggcatgattcacatacaaaatgacgtaatccacaccaggaggtttctatgggagatttatccagaattgaaattcttccccaggcatttctttcccggatgagggaaatgcttggagacgaatatgaagaatttttagaaagctatcaaaagccccgtacctacgggcttcgtgtcaatacatcaaaaatcacctgcgaagaatttgaaaagcttgttccgtttccggtaacaaggattccctggacagaaaacggatatttttattctgaagatgtccgcccttccagatgccctatgtatcaggcagggctttattaccttcaggagcccagcgccatgaccccggcagcctgtctcccagtaaatcccggagaatctgttcttgatctctgtgctgctcccggcggcaaggccacagctcttggcgcagcgctgaaggggcagggacttctgatcgccaatgatatcagcacttcaagagcccgggcgctgcttcgcaatctggagcttttcggcatttccaacagctttgtcacaaatgaaacgccagcccgccttgcagagcagtttccggaatttttccacaagattcttctggacgctccctgttcaggagagggaatgttccgaaaagaagaagctctggcaaaggactggacccctgaaaaatctcacgaattagccagaatacaaagggaactgattcttcagtctgcagatatgctccgtcccggcggacttcttctttattctacctgtacctttgccccggaggaggatgagggaaccatttcctaccttctggaacaaagagagaatatggagcttctggagcttcctgcgtatgaaggattttctccgggagtaccggaatggggaaatggaaatgagaatctcagaaaatgtgtacgcattttcccacacaaaatgaacggcgagggacattttctggctcttatgaaaaaacagggacagccggatatggttcagcagccatcttctgtccgcccggatgccaacaccagaaaatggctggagcttttccttgaggaaatcggtttacagaccttgggtggaaaagcctttgactggaaccgggtggagacaagaggagacaaggtctattatctccctcctgtaaacaccggatttcgcggacttacctttctccgcaacggcctgtatctgggcgatctgaaaaagaaccgttttgagccctctcagccttttgctctggctctttataaaaatgatgtgaaggctgtgatttctcttcctgtggccgattcccgtctgacccggtatttaaagggagaaactcttctcattgaagaaggtgaagcccgcggcaaaaaaggctggcatcttctctgtgcagagggatacccacttggctttggcaagctggtaaacggtactctgaaaaacaaatatcctgcaggctggagagtctgagtaaaaaaatccccgggcagagcttactctgtccgaggatttttctataatattcatatctggctacctgtttttattcgcctgtcaggaagtggacggcagatcttttaccggaatttctttttgaagggtaaaggaataaataatcttttcttttacttttttcttcaaaagtctttccagagcctgagcataatcgtcaagctgtgtacggtaacgttcttccagtatcttctcttcgcccggaagaatccggtctgtcttgtaatccacaagaaccagttcaccgtcttcctcaaaatatgcatcaataataccctgaacaagaattttttctcctcctgtccaggtgtcattcatctctgaggcctgcacagatatcacaaagggctgctcgcggaaaagcttttgttcctgagaagcttttttcattctctggcccagatctgagcgaacaaagctcagaatatcctttatataaatacattctgcttcttccggactcatttttcccatttcttccagcctgccgatctgctttctgattccctcaaaggaattatctcctgtataatccagacattccataacctgatgataggcagttccctttgccgctccccggacagtctgctcttctgctgcaaaccgtggaaccagcggtacaaattccttctgaaaaaagacagtctcttcctgttcctcatcctgccagcttctttttttcagctcagatacgcttacttttaccggcatctctgccagataataacagggatactgaaactcaaaccgttcttccagagtctgccggatttcctggtcatacactttttcacagtcccagtttttcatcacctgctcacgtatctgcaagtctgtcatatccacgatttgatcctgaataagatctgatgccgtaatttttcttattttgaactcagctctgtcatctctgcactcctgtacgcttcctgccggaataccataatccaggtaaagatttctcattgcactgtggcctgcaagagccggaagtatcacatcccagaaatctcttgctccggaccggattcctccgggcagcaatagctccttttcatttcttccataggaaatccgcgccagagtttcctccagctttgctatggtgcctgtaatataaagcttttcttttgcgcgggtaagggcaacatagagaactctcagttcttcgcccagactttctcttttcagttctctgcggataatctgtttgtgaagagtaggcgcgatcagccttttttccggaagtatggcatcagatccaaatcccagctccggatggatcagaagccgggcgtttatatcctggaaattaaactgttttcccattcccgcagcaaacaccacaggaaattccagtcccttgcttttatggaccgtcatgatctgtactgctccgctgccggcgtctgttacattcacttcgccaaaatccacctcatatttctgaaggctctcaatatatctgacaaaattaaacagtcccctgtagctggttttttcataatccattgctttttccaccagcatccgaaggttggctcctctctgatttccgccgggaagagctcttacatacgtttcgtagcctgttgctttcagaatatacaggatcagctgatgaaccggtgtataagctgccatatcacgaatttcctgaagctgcctgtgaaattttttcagtttgttcctgaggtttcttttttcctgctcttcacaattctctgcttccccttcctccccgggctctttttcaataagagcgcagaggctttcgtacaaaagcccttccggactttccagacggatcagagacagatcctgagctgtacagcccaccaacggagaatgcagcacacctgtaagaggaatatcctgcagagggttgtcacagactctcagatagttcaaaagagttactacctcctgtgcagaaaaatacccggttctggatgcggtatacgctggaatcccatttgattccagcacctcccggaaggtatctgcccatccgtaggctgagcggagcagaatcacgatatcgccatactccaatggcctgtagattccggtttctttgtcaagaatctgctccctgcctgtaattctgtttatttctgcggcaatggcaagggcttccagctcctggggcgtctgcccggaatcttcatcctgaagctcttcactgtctttttccaccagaagcacttccgttttcagaaactctccaccctcagggaaatccgctccgggataaagagcgttgttgtcatcataggtaatgcctcccatatcttctcccatgatcctgcggaaaatataatttacactttccagtacctgagcgcggctgcggaaatttttgtgaagctcaatcttctgttcccggctgtcttctgtggaataggtcttatacttttccataaaaagttcaggtcttgccagtcggaaacggtaaatactctgcttcacatctcctaccataaaaatattttttctgtcctgagaccatccggaaaccatggaggtgatcatctcctggacaagattgctgtcctgatattcatcaaccatgacctcctcatatttttccgaaagctccctggctgcctggcttggatttccctcctcatccatgagaatgttaagggcaaaatgctccatgtctgtaaagtccagaatatttttttcccgctttttctgagaaaatttttcctgaaacccacaggtaagctttacaaggctctccaccggacttctgcagcagtaaagaagctccagtaattcatcctcactccagcagaaatatctggcagaaagctctttgataatatctttttcttcctctctgaaggtttttgcctgaatttttttatcctcatcctgttcaggaatcttttttgcagaaagccgcgcaaaagagggctttttcaaaagctctgcagttttgtcataatccttttgttctgcagcctgctttatctgtccaattaacagaagatcactgtccagagccgcctcatactgccagggtccctccggtgattcacatactgcccttgcctgatttgcaatccgttctgcttctttcagctgttctccggtttcttcccacaaaagagtgatccaccgggcctttcgcagttcctctttgttgtccaccctgtaaacttccaaacactgctgaagccatttttccggaaacggatggctgacagaggattcataaaccttttgtatcagctccttcagtccctcatctgtttttccgggagaataacattccaccagttccagaaacgcttcatctctctgctcataggcttcttccagaagctcctcaaggacctcttctcttaaaagcttcagctcgccctcatctgctgtacgatatccgggatccagtccgatcatatgaaaataatttttgataatataggagcaaaagctgtcaatagtagtgatctgggctgtgtgtatcagagtcatctgcctctgaagatgctcgttgtccggttcctcaaaaagcgcctgtcccagagccgcagaaatacgctccttcatttctccggccgccgcccttgtaaaagtcatgatcagaagcctgtcaatatctaccggatgctctttatccagaatcttactgagaatacgctgtacaagcactgctgttttaccagagcctgcggctgcggaaaccagaatatttctgtttctcagggaaattactttctgctgttcttccgtccatgtcactgccatatcagcgttcctcctcttccagatgattccatatttcctgatccgaaaactgtttcagacgtctgtactcatagcctgggattttccggtcaaatccgcagattccctgataggagcagtaggtacaggcagttctttttcccagctcatagggcgatacctccgtatctccggaaagcatctctccccggatatctgaaatttttctttttacatattcattcagaagacggaactgctcccttgtggcaacagaggaaccttttcggaaggaaccgtccttattataggttactggcaaagaaaccagacttctgtccattttctggatcacctcagaatttgcagccacaagtccgttcattttcagttctttcagaagccccggctggatgctgtccatatcagcctgaatattttcctggatcatgggatctttcacattgtaataaaaaattcctgccggctgtatgtcacagtccgggtactttctctgttctgcatccagagcggcatccatatataccacaagctgaagctgaagtccatgatacaggctgaccaggtcaaaggaagtgttccccgacttataatctatgatttttacatagacctttttgtcctctttcagcacgtcaagacggtcaatccttccccctcctatggaaacctcaaagccttcgggcagaaattctccctggcgaagctgctcctgaagtgcccatacagtacgcttcagaatacgggaggttctctctatcatatactggtttctggcgctgctttttaatattgtgtttccataatctgccgctacctggttcagacattcttccacaatgctgtctctttcctcctcatcaagctcgctccacctcagtccctttcgctggagctctgcggcaaatttctccagtgcctgatgaatcacattgcccatatccattgcgcgaaactcatattctgcccgctccgtgatctcaagaccataccttaaaaaatgggcaaaggcacaggccgcaaactgttccaacctggtggcgctgttcggtgatacctccccgtaaagagcctttgcaacactggcgctgattctgtctgccggctttctcataaatgccgcgtctgtcagcttttttgtaagctcctgatattccggacttctcagataccagctgtacagttcctgaaacagcggttcctcatatttatccgtatggcttccaaggatttccagaagataatccatgcctgtagaaggtgtttccagaagctccagaaagctttccggctcctctgcccgctccgggtgcagctgcggataaagccgtctgactgtatggattagataggccgggcttaccgcctcccccttcatgtttgaatctgcaaaagagaggcaaaggtgttctgacggcttggtaagattcagatataaataaaatctctggatattcatcagttcctttggtccgggagccagttccactccctggtccgcaaaaaattccctgtccagttctgtgaggattcccccggactctgtgttctttggaatatttccttcattcacgcctacaaaaaataaggcgcgagcatccttcagacgggttctctccatatctcccacaagaacctgatccagtcccggaggaattaaagctacttttgcctggctcattcccgtttccagaatctgccggaattcctccggggatactgtttcctcccccagaatttccgtcattttatcaagaagctccatgacgatcccgtaaatctgagcatattccttttccattgcccgatcacccttccggcaaaatacctcttcctgctcataaagtttttcctggatacggcttcttacaataaactcataaagaaatccgcaatattcttttactgttttcttttttccggaaaatccccgggcaagctcttctgtttcccggacaaaacgctcacggatctcattcagctccaaaatagattcctctttcattccccgataaatccgcacccacttttccttccattttttgaatccccggattccaagggctaccacatagttttccagccagtctgtttcctgtcgtgtgatatccgacattccgcatcgcagataccggaacacactttcataggaaaatccctgcgctgccatttccagagctgcccttacatactctacaaaaggattcataagaatggagtgcttctcatcaataaaacagggaattccactattatcaaaggcctgtctggccagatttccatattcctccagattgcctgtaatcacagcaatttctccaaacctgtacccctcttttcgtacaaggcgaagaatccttcttgcagtttcttccatttccttcagcggagttcccgcagaaaaaatactgatttccttttgttcctgtttataaacctgtctgcgataccggaacagatttttttccataaaagaaagagcaggagaatgggcaaaccgtgacttttcaccggcttttatccacacaggctcttctgtttcttttgtaagctcacaaagtccccgtatcattttgtggctcatgtaaaaaagctggtgggatttttcttttcccataaaaggttcctgtacatccatagtcacagtcaccaaaactttactgcacacagccagaagctcttttaccaccttcatctgcacaggagtaaaaccagtaaagccatccagaacaagcacgctgcctcgaagcttctcagaaaaaacaatctcttttgccagaacctccagcacttcttccggtgtcatgtaatgttctctcagataatcccgaaatgcctgataaagaaccgtcacatcctgaagcttcatctgaagaagagctctgtcagaagcgtcctccttcattctttccagttcctgctctcctacctcatactgcataaattcagagatcagagattttacctcgtccagatatccgggctttttcatctgatttttcagataaaccagatctttctgatgcttctggaccagcttctgaaggaccatatttttccctgtctcttccagaatctttctggtatctccgcctacctcctcaaaaacacgaaaggcaaggcgttcaaagctgagtacatcaatattcaggattcctccgtccggatgcatttctaccagtgttttttgcgtctgcatggtaaactgttccggcacgatcacataaaaaagctgttccggatgctctctggcttcctgaatcacgctttgaaaaactgtgtaggactttccggaaccggaatttccaataataaactgaagcggcataatttcctccatacgaaaactttaactgcacatattcccattgatgttatacaactgttaaaataaatgcgaaaatatactttcacagtatctcttatatcctgtttctgtattgtagcacatatgttcggtaattgcaatcatgctaaaatatcatatccatatgcttaaatgaaacttatacagacagctgtaaatagtaaatttaaaaaatatacaaaagtcatacacctgaagaaatttttccagatcagtaaatattgtgatcacgggaaatccttttcttttcatgaatttgtctttataagctgtacacatgaatttgtctttataagctgtacacatgaatttgtctttataagctgtacagatagagcttaccatggaaatttgatatttgctcatttacaggacttaaatatttttaaatagaaaaaaaccagtacttctgttcagtactggttaagttgcacattcaaaactacatacatgttgacatttggaatcgtgtgaccaagctttcgctcgaatgcggtcacctcatgactccgtcattcggtgccttttgcttcgcaaatgtccagtccagttaagaaccactccttcacaagcaagcttgttccgtcctgtttctttcctgtcctgaccgctttctcgctttttggtcaagccctcgaccgattagtagcagtcagctccatacgttaccgcacttccacctctgccctatctacctcgtcgtcttcaaggggtcttacttctttcgaatgggatatctcatcttgaggggggcttcacgcttagatgccttcagcgtttatcccttccaggcttggctacccggccgtagacttggcagtctaaccggtacaccagcggcccgtccatcccggtcctctcgtactaaggacagctcctctcagatatcctacgcccacgccggatagggaccgaactgtctcacgacgttctgaacccagctcgcgtaccgctttaatgggcgaacagcccaacccttgggacctactacagccccaggatgcgatgagccgacatcgaggtgccaaaccactccgtcgatgtgaactcttgggagtgataagcctgttatccccagggtagcttttatccgttgagcgatggcattcccacttaataccaccggatcactaagccctactttcgtacctgctccacccgtcggtgtcgcagtcaagctcccttctgcctttgcactctgcgaatggtttccgtccattctgagggaacctttgggcgcctccgataccctttcggaggcgaccgccccagtcaaactccccgcctggcattgtcccaccgccgggtcacggcggatggttagaaacccaatactgcaagggtggtatcccaacagcgactcccacacaactggcgttttgtgttctcagtctcccacctatcctgtacatgcagcaccggatcccagtaccaaactggagtaaagctccatggggtctttccgtcctggcgcaggtaaccagcatcttcactggtacttcaatttcaccggatgcattgtcgagacagcgctcaaatcattacgcctttcgtgcgggtcggaacttacccgacaaggaatttcgctaccttaggaccgttatagttacggccgccgtttactggggcttaaattcaaagcttcgcttgcgctaacctctcctcttaaccttccagcaccgggcaggcgtcagcccatatacctcacctttcggtttcgcatagacctgtgtttttgctaaacagttgcttgagcctattctctgcggccaggtctccctggcaccccttctcccgaagttacggggtcattttgccgagttccttgacaatgcttcttccgccggccttaggattctctcctcatccacctgtgtcggtttacggtacgggtacggtataaactatagcggcttttcttgacgcacagctcacgggcttccctactttctttcggtccgcatcgtgtcttcccattgacacacggatttgccagtgtgtctggtacctcacttgcaccgggctttccattcccggctcccgctttctgcacgtgtccccacagttctgttataccgcagtacaggaatctccacctgttgtccatcggctacgactctcgtcctcgccttaggccccgacttacccagggcagatcagctttaccctggaaaccttggatattcggccataaggattctcaccttattctcgctactcattccggcattctctcttccatgcagtccacagctccttacggtactgcttcgtcccgcatgcaatgctcctctaccaatcatttctgattccttagtttcggtggcgcgtttcagccccggacattttcggcgcaggacctctcgaccagtgagctattacgcactctttgaatggatggctgcttctgagccaacatcctggttgtctttgaaatcccacatccttttccacttaacgcgcactttgggaccttaactgaaggtctgggctctttccctttcgactgcccaacttatctcgtgcagtctgactcccggtaagcaattctgcggcattcggagtttgatattcttcggtaggctttgacgccccctaggaaattcagtgctctacctccgccaatctctaccgaggctagccctaaagctatttcgaggagaaccagctatctccgggttcgattggaatttctcccctatccacacctcatccccacccttttcaacggatgtgggttcggtcctccactgcctcttacggcagcttcaacctggacatggatagatcacccggtttcgggtctgccctcactgactctggccctcttaagacttggtttccctacggctccggtccttaagaccttaaccttgccagtaagcgcaactcgccggaccgttctacaaaaagtacgcggtcgtgcatataaagcacttccacagcttgtagacacagggtttcaggttctctttcactcccctcccggggtccttttcacctttccttcacagtactatgcgctatcggtcactaagtggtatttagccttagggggtggtccccctcacttcccgcagggtttctcgtgtcccgcggtactctggatcctgctcagtctgctctgctttcgcgtacggggctctcaccctctccggccggctttcccaaaaccgttctgctagctttacagaatcttaaatgcagtccgtaaccccagcgtgcacgcacactggtttaggctcctccgcgttcgctcgccgctacttacggaatcgagttttctttcttttcctccgggtacttagatgtttcagttccccgggttcccctccatacgttatggattggcgtatggatacatgaggtttcctcatgtgggtttccccattcagagatctccggatcaatggatatttgctcctccccgaagcttatcgcagcttatcacgtctttcttcggcccttagtgccaaggcatccgccctgtgccctttctgcttgacctttcgcttttcatcaccctagcgtaggtgatgcggtctttgattctcattgctgataaataaatttatcgatgtcttcctatcttacgttttacgtttgtatcaaggatctttaatcttttcgattaaagttacatgtatgcagttttcaaggtgcatgtctgactgatcttttatcagtcatcagaatccgcaagcttccttacaaactctaatcactggtaaaaccaccagttatatctgaacagcttttgctgtttttttcttttgatctggcggccacctgctctcccacatcgtctccaatgcagtaccatcggccgcttgggtcttaaccgtcgtgttcgggatgggaacgggtgtctcccccaagcgcatcgccaccagaagcagagtacttaatgagtacaagatttatcgccgtacgaatttagtacggactccgttccgaggaacttaataagcccaactgtaaggcagggcgaatttagtgaacggaacttccttgtttccccttaatacctagacagtgaaacacatctctctacttcttcttccttagaaaggaggtgatccagccgcaccttccgatacggctaccttgttacgacttcaccccagtcatccgtcccgccttcggcagctccgtcctttcggttcggtcactgacttcgggcgttactgactcccatggtgtgacgggcggtgtgtacaagacccgggaacgtattcaccgcggcattctgatccgcgattactagcgattccagcttcgtgcagtcgagttgcagactgcagtccgaactgggacgttatttttgggatttgcttaagctcacactctcgcttccctttgtttacgccattgtagcacgtgtgtagcccaaatcataaggggcatgatgatttgacgtcatccccgccttcctccaggttatccctggcagtctcctcagagtgcccggccaaaccgctggctactaaggataggggttgcgctcgttgcgggacttaacccaacatctcacgacacgagctgacgacaaccatgcaccacctgtctcctctgtcccgaaggaaaggtgacgttactcaccggtcagagggatgtcaagacttggtaaggttcttcgcgttgcttcgaattaaaccacatgctccaccgcttgtgcgggtccccgtcaattcctttgagtttcattcttgcgaacgtactccccaggtggaatacttactgcgtttgctgcggcaccgaatggctctgccacccgacacctagtattcatcgtttacggcgtggactaccagggtatctaatcctgtttgctccccacgctttcgagcctcaacgtcagttaccgtccagtaagccgccttcgccactggtgttcctcctaatatctacgcatttcaccgctacactaggaattccgcttacctctccggtactcaagatcaacagtttccaatgcagtccgggggttgagcccccgcctttcacatcagacttgctgctccgtctacgctccctttacacccagtaaatccggataacgcttgccccctacgtattaccgcggctgctggcacgtagttagccggggcttcttagtcaggtaccgtcattttcttccctgctgatagaagtttacataccgagatacttcttccttcacgcggcgtcgctgcatcagggtttcccccattgtgcaatattccccactgctgcctcccgtaggagtctgggccgtgtctcagtcccaatgtggccgtccaccctctcaggccggctatggatcgtcgctttggtaggccgttaccctgccaactggctaatccaacgcgggtccatctcacaccaccggagtttttcacactggatcatgcaatcccgtgcgcttatgcggtattagcagtcatttctgactgttatcccccagtgtgaggcaggttacccacgcgttactcacccgtccgccactaggattataacgacttcaaccgaagtctctgtcaaaataatccccgttcgacttgcatgtgttaagcacgccgccagcgttcatcctgagccaggatcaaactctctgtaaaagtgtgtaagcaattcagcaatgcttgcattggcttaattgcatctcaccgattgagccaaaggctcaagaggttgttccactcaagataactactagctatctctcgttttactgttgttggttcatcgaaccgttctcaaataatgaagttcgattcactaaattcgatcttcgcttccgcttgatctcattaagttccttcgaaccgcactcacactaaattcacacttcgcgtttccgcttgtgttcattaagtgttctgtgtgtaaaagaattttcgagaatcgtatgtgtctcactgtttagttatcaaggttctttgttttctgcctcttagacagctcgtttactttatcacatctttttttgtttgtcaagaacttttttcaagttttttcgaactttttcgatgttcttttaagtaattcgctctctcgttgacagcttgtttactttaccacactcagaaaggattgtcaacaagttttttgacttttttcaaagtttttcaagttgtttcttcaaaagaatcatttctttgtgacagccagattaatttaccactttcttccgcctctgtcaactgttttttgcactttaaaatactttggtcgatatagctgtttaccggtcatattctttgaattctattgtcttgttttgccaaaatcctacgataacaggtgaacctgtcattgccgaagatcatttgaaatgccttttaaccaggctgccgggaagtttctctgttccgtcataaaatctcccggcacttcatatgattaatcagaagctttttatattcggtattttccattcaccgacaccccgtgcagcacgtacatattctgaccaggaggcgcactctatgagttccaaaaccaaaatcgttgttttacatatgaaagagatcatttatacaggaatcttcctcctgtttctgatcgttctgggagttctgatgttttttatgtttgatcccggcaaagctaaatccgtgtccacggatccggcttccgtttatactcccggcatctaccgttcttccattgaacttaacggaaacagctttgacgtggaagttactgtcgatgcacagaaaatccgttccatccatctggaaaatctcagcgaaagtactgccgccatgtttccgcttgtagaaccaacccttgaagaattatcaagccagatttacagcggtcagtctctggatgaactgaagtattccagcgatcagaaatacacctctcttatgctgatcaaagccattgacgaggctgtcagcaaagctgagttaaaaaaataaaacagacaaaaatgcccattatcgtttttccttcgataacgggcattcattctgtataaatcaaaattgaaagctcttttgttttttaactgatataatcttcagaatcgtttctgtggacgatttctttcctgtcttttccccggcttttcttctccggttcagatctttattctgtccagctgcctgagccacaatgttccacaggcatcgctcggcatacgaagatctccccttggagaaacagccacacttcctaccttcggtccatccggcagacaggaacgcttaaactgctgggtaaagaatcgtctgtaaaatatcttcagccatttcagaatcgtttctgcatcatattctccctcaaaagccaccctggccatacggaagattttttcaggcggacaggtccagcgcagcatatgataaaggaaaaagtcatgaagctcataggggcctacaagatcttctgttttctgggcgatcactccgtcttccggcggaagaagctccggacttaccggagtatccagaatatcaagaaggatacctgacaatttcttatcctcgcaggtatctgcacagtattttacaagatggcgcacaagagttttgggtacagagctgttcaccccgtacatggacatatgatccccgttgtaggtcgcccagccgagagccagttctgacagatctcctgttccgatcacgattcctcctgactgatttgcaatatccataagaatctgggttctctctcttgcctgtccgttttcataggttacatcatgtttgtccggatcatgaccgatatccctgaaatgaagactgactgcctctctgatatttacctctcgaagctccgcaccaagacagcggctcagttcacaggcattggaataggttctgtctgtagttccaaagcacggcatagtcactgctgtgattttttctcttgaaagtcccagcatatcaaaagccctgactgttacaagaagggcaagtgtggaatccagacctccggaaagtcctatcacaacattctggcagtgaatatgatccagacgttttttcagacctgttgcctgaatgttcaggatttcctcgcagcggcgggctctttctgtttcagaagaaggcacaaaaggtctggagtcaaatttctgttccagctttgtctctgttttttccagataaaacagcgcctctctgaagccttctctttctctgtctgaagcaaatccacaggtagtcattctcctgcgttcattattcagtttatggatatccataattccataaacagctccgttttcaaagcgtctgctttctgcaagaatggttccgttttctgcgatcagatcatggcctccgtaaaccacatcctgagtggactctcccggtccggcagaagcatagatatatccgcacaccagtctggctgactgactgcttaccagatttctccggtaagtatcctttcctgccagctcatcactggcagaaagatttacgatcatatttgctccacgatatgcatgtaaattgcttggcggagctgccacccacaggtcttcgcaaatttctgccgcaaccttaagctccggaaactccggacaggtaaatataaggttcggagaaacaggcacttcatattcttccgggtcatcctccagatcaccttcgtctatatagtccgcatcatccatgtcaagctcatccaggaaatcatcctcttcaaaatcaagcccatcctcagtattttcccgggcatccacatcctgcagatcttcttctccgaaaaaatgtatctcaatttcaggatccttttctgcatatgcaccgcagtagtcttcccctttcagcagaatctttccatccacatcttttcccggggaaaaataacgtccctcataaaattcattataattgggaatattcacctttggcacaaaacccacaatttttccacgattcagcgctgccgcagcattataaagttttccctggtattccagcggcagccccacaaaaataagtccgtttatatcctctgtctcagctgcaatacgaagaagctgagactttgcttctttcagaagtgtttcctgccagaaaagatccccacaggtataacctgtaatgcacagctccgggaacaccatgaccattgctcccttttctgccatctcatgtaccatacagataatctctccggcattatattcacagtccgctacccgcacatcaggtgttcctgcactgactttaataaatccgtctttcatattttcccctttcctgtccgcatacaacggacgccaggcatctcttaccagcctgacagctttgctatctgcactttctgagaatctctttcagctcttcaacactgaacacataatttgtattgcagaaatggcagttcagttctacttcctttccctcctggatcatttcattcagatcctttctgccaatactgatcagcgctttttccacacgttctttgctgcagttgcagtaaaattctgttggaaccttgtctgtaaattcaatgtcaaatccgtccagcactgcctccagaagactttctgcagtatgtccctgctccagaagagtggttacagactggatcttctgtacattttcttccagctttgcaatggtttcctcttctgcaaaaggcataacctgaataataaatcctcctgcctgctgcacagtattgtccttattcatcagaactccaagtcctactgcagagggaacctgctcgctgactgcaaaataatacgtaaggtcttctgcaatctcactggtctgaaggactacctgtccggaataaggctccttcagccccatatccttaattacattaagaaggccgatccctactgcgccggcaacatccagtttgcctttgtcatttgccggaatgatcacctcaggatttcccacgtaacccttcactcttccctgagaatccgcagttacagtaattccttccagagggccgctggcctgaatctgaagtgtgagaatatccttatcacccttcatcatcacacccatcatagcccctgcagtaagcagtcttccaagagctgccgtcgccacaggactggtattatgagccttcctggctgtctccactgtttctttcgtcactgccgcgaaggcgcgcacctgactgtttgccgctgttgctcttacaatataatcactcattttattcctcctgaatctgtatctcttaaattttgtcttataaaaataatcctttatatttatccttcaggctgtatgcttgcctttttcctttgccacaaaaaacagtctttcactgtctttggatgccggattcatagtataggcgtcataaacagccacaagctccatccctgcctcagcgatcagagcctctatttctgactgctcatatgctttctggcagtgaagctcctcacatttttcataaagcccgtcttctctcggcaaaaaaactgccagctcatagatatttataccattttccggatcatagctgttttcccagataaagcttccttcatcccgattttctgctatggttgtctctcccagaatatcccggtatttgtgaactgtattcatatcaaacagaaaaataccgcccggatccagataattatttaccagtctgaatacctgaagcagctccttcctgtctgtaatgtaattcaggctgtcgcacacactgatgatcgcccgtacagttccatacagttcaaattcctgcatatcctgaagaagatagagaatatcctgcccggtctccatttttttcttcattgcttccgcaagcatttcctcagaattgtccacaccaatcatatcatatcccttttgtgcaagcaatcccgtcatggtgcctgtgccgcagcccagttccagaaccagtccgtcctcaattccccgggctttcagatgcttttctacataagctgcccagctttcataatcaatattgtccataaacaggtcatacacctgtgcaaattttccgtatgcttccactgcacttctcctttttatgtaataatacgcccgggaaatctgcccggaacagactctctgaatgagaggaaaaggcagatgatcgctcacctgccttaaatattccgctctatgatcgcctctgcctcttatttactgaaccggcatatagtatacgtcagcagcctctccatgccagtaatagcttgtgccatcctctgtatacacatcctggtcatttgcaaagctgtaggtatttccgtcaaaatcaacccagtttccgtttccgtccggctgaattaccagcggcttaccgtcagagtttctgtaaatagttcttgtttcatctgtattggaaagctgttcttctgtaaagcctgcagaatttgttgttccttcagaagaagactctccgctttcctgggaatcagcgcctgtatcagctgctcccgcatctgtatttcctgtatctgctgcacctgcatcagtgtttcctgtatttgctgccgcatcgtttcctgttgcgtctgcgcctgccgcgtctttattttctgtatttccggccggtgctgctgttcccggagccgcctctttcagtgaagaatttccaagaatcttaaaggaatccactgcgctctttacagatgccagggcttcttctttttttacagaagcttcaatagaatagtattcactggcatttgcaaatactttatgaaccacataaagagctccgtcactcttttctgtattcagcatttttgtcacatagctgtacacaccgattccgttcacatcctcagctttatagtcctggatctcaaaatcagtgccctgaaccttatctccgtctgcctgatccagagaaacagccatatcctgtgtgcttggaatcacagtagcagccattgtctcttctccctgaccatgaagaataaggatattgccattgtccggggactcaaagctgatggtatctgtctcgtcagttttgtttgcccaggtagcatccggaagattaatggaaacagatttatctgcggaggtataagtggtatcctgtacattgggggcaatggtaggtgtagctgttggagcctttgtcacctccggcgccggtgttacgctgacaaccttctgagcttccggctcgtcctcaccgaaaccgcagcctgccataaagacagatgctgatattgtaaccgctaaaacagcaagtaattttttgttcttcataatatcctcctaaaaaaattctgaactctactcaaactctttgtttcacattttacaattttattacatacatgtcaataaattttccccggcatgatgtgaaattcctatgaaaaaagtataaatttctgtcatatccttagttgaagtccggcttttcagcctctgactgtatacataaacagttcatgaagcgctctggttgccgtaatatattctgcctgaattttcagcgggcttttgtctgaatccataaacacaccgtatactctgtcaaattccagaccttttgcaagataaaacgtagtaactgtcaggcccttacaaaactttccgctgttccggtcaagataagaaatcgtatccctctgctccggcgcttccgtttccagcttctgcttcagataagcccctgcagcttccgcttccttttctgtcataaagatcactgcccctgtctccaggcgctccctgtctctgaaccagattctaagaacttcatttaaagccttttctgtactttcaaatgtttcttcccgtacaggctctccatgccgctcaaacagttccataccggtaatccccgcaagccggtttgcatactctgcgatctccactgtattcctgtagcttctgttcatatagatttttctgatatttctgccgaaaattccgggcagaaacttcataacatcctgctgcttttcctccatggtctgagccctgtcgcccagtatggtcattctgcatggaaaaagcttcttcaggatcagatactggatccaggaataatcctgcatttcatctacaacaaggtgacggatatcccgatgctccctgcaccgggtcaaatgatatttcagatataaaacagggtaaacatcctcatacttcagccttcgtttttccaggggacgtctgggcagaggacgaaacccctctctgtccagaaaacggctgtaaaggacataaaagtctcttgttccatacattcccagaaacttttctgttacctcatccttttcttcctctgaaaggtctctgtccctcagtgtttccacctggtcgataaaatattctgcaacagcttccattctggataaaaggggaatgtcctgaaacctgaaataaaacagacggatgatctcagattcttttatggaacagcctttatactccacatcccggaaattcatcagttcatcttcaaggctcatcataaatccctgcagccgtgaaacaaattccggagactgtttttctctgtactgtttccaggtatccggattttttactgccttttcaatctgatcgtacttgtcctcacagtctgctgccacatcctgcagctctctgtaagcaaaaagatcaaaactcatttcacggatattttcttctcccagctccggcaggatatgtgagatataatctgcaaacacactgtttggagaaaggatcagaatgttggaagatttcaggtttttgcggtcatggtaaagaagataagcgattctgtgaagagccacagaggtttttccgcttcctgctgttccctggatcaccatgatcctgtcctctgtattgcggataatggcattctgctctttctgaatagtacggataatgtttttaagctgaacctctccgcttcctccaagctctgctttcagaatatcatcatcaattttaatgtcgctttcaaattcataaacaagctttccccggcggatcttatactgccatttagagcttatctccccttcaaaaactccctgaggagcttcgtaggaagccagccctttgtcataatcataaaaaaggccgctgacaggagcacgccagtcatttacaagaggacggcttcctgctctttccgccagatttccgatcccaatgtaaaactgctccggctcctcatctccctgataaataaaatccaccctgccaaaaaacggggaatcctgcatattgcggaatcttttcctcagaagaagctgctcctgattggcatttacctgggccagaagagcctgtctgttatcaaattcctcatatccgtactggtccatttctgtataattttcccagtaatattcatgcatgtcctcaatttccctggcaccggcctcaatggaagcatttacttcttccagccttttttcaagacatgcaagcacctgttccagatattcctgtccggatttttctgtctgcatacgctcaggctaccacaacagcagtaccgctgacagttaccataagcattccattgtcagatccgagaacctcatagtccacatccacgcccactattgcatttgcgcccctctgtgctgccctttcttccatttctcttaacgcctcttctcttgcgtgcatcagctcatcctcatagcttgcggatcttccgccgaaaaagtttctcattcctgctgtgaaatccttcagcacatttactccgctgaccacctcgccaaaaacaattcctttatattctacgattttctttccatctacatttgcagttgttgttacgatcatttgatgttcctcccttcatcttccggctgatttctctatacagctctgatgtacgaaactcattccatctgtttacggtatattcgttactgttcgctcttttcacagcaatttgccctgtgaacagctgctgatattataatatattttgcgtaaactgctgtaatccatacctgcctgaaagaattattgtctttcacagtaataaagaattttctgtatttttcattatatccaaaagagcagtggctgacaaggatttattcctcagtcagtccactgccctgggttattgttctgctgtctgtaccttttgccgccctgcccgaaatctgttctgcctgtctgcggcagtcaaaattttattttctcaggagcactgagccttctgctcaaactggctgttatacagttctgcataaaaaccgcccttttccagaagttccttatgatttccctgctcaatgatatctccgtccttcattacaaggatcagatccgcatccttgatggtagaaagacgatgggcgatcacaaaactggttctgcctttcatcaggttattcatggccttctgaatctgcatttctgtacgggtatccacagatgaggttgcctcatccaggatcaggattttattgtctgccagaattgctcttgcaattgtcagaagctgcttctgtccctgagaaatattgctggtctcctcatcaaggaccatctgatagccaccgggctgctgcatgataaaattatggatatgggctgcctttgcagcggcgatcacctcttcatctgtggcatccagccgtccgtaccggatattttccatgatggttccggaaaacagccaggtgtcctgaagtaccattccaaacatttcacgaagctcgcttctgttaaaatccctgatattatgtccgtcaaccatgatctctccgctgtttacatcataaaaacgcatcagaagcttcaccatggttgtttttcctgcgcctgtaggtcctacaatggcaatcttctgtccgtctgtgacttctgcagaaaaatcatggatgatgatcttttccggattgtagccaaaggaaacatgctcaaactgcacatcccctgtaagattttttacagaaacaggattctctgcagtctgctcttcctccggctcctccagaaactcaaatacacgctcagaagctgccgctgaggactgaagcagatttaccacctgggcgatctgctggataggctgggtaaagttacggatatactggaaaaaggactggatatctcccacctcaatgcttcccttaatagtgaagattcctcccaggaaagcaaccattacatatcccaggtttcctacaaactgcatgaccggcatcatcattccggagaaaaactgtgatttccatgcagattcataaagctttttgttgtcctcttcaaattcagcaacaacatcctgctctttgttaaataccttgactacattgtgtccgccgtagttttcctcaatctgtccgttgacctttccaagatagctctgctgatcacggaagtatttctgagaatgtttcatgacaaaattaatgatcaccatggaaaccggcaggatcagaagcgctgccagcgtcatccagacgttaatggacagcatcataaacagtacgccgataatggtagtaactgaggtgatcagctgtgtcatactctggttcaggctcatctgcaaagtgtccacatcatttgttaccctggaaagaatctcaccgtttgtcctgctctcaaaataattcagcggaagacggttgatcttttttgaaatatctttcctcagattataggtaacatcattggaaattcctgtcatcacaaagccctggataaaggaaaaaccggaacttgccagataaagaatcataactcccagaaggatcattgcgatcttttcaaaattgatccctcctgttccgtttaccttggctaccagtccggaaaacagctctgtggtagcttttcccagaatcttcggtccccatatgttaaaaatcgtacctgccactgcaaaaacaaacatcagtataaaccggaatttataccgttccatataccggaacagctttgccatggagcctttaaaatcctttgccttttcccctccatgcattcctcttccatggcccatggggcctcttctattttcactcatttgccagttcctcctctgataactgtgacatggcgatctgacgataaacctcacagttttccatcagttctctgtgagttcccagtcccgccatctttccgtcatccagtacaagaatctgatctgcgttcagaatcgtactgatacgctgggcaacgataatggtcgtcgcattttttgtatgctcctttaaagcttttcgaagggccttgtctgttttaaagtccagagcagaaaagctgtcgtcaaaaataaagatctccggatcctttgccactgcccttgcaatggaaagcctctgcttctgtccgcctgaaacattggttcctccctgagcgaccggagactcatatccatgaggtttttcttcaataaaatcctgcgcctgggcaaccatggccgctttctttacctgttcctctgaaatatcggtttttccataacggatattggaatcaatagttccggaaaaaaggactcccttctgcggaacatatccaaggcgatcacgaagctctttctgggacatgcttcttacatccactccgtcaacctttacgcatccctgtgtcacatcataaaatctggggatcagattgattagagagctttttccgcttccggtacttccgatcacagccagtgtctggcctttttccgctttaaagctgatgtcagtaagaacattttctccggcatccggataggcaaaggatacatggtcaaactctacggttccttttatttcctgtgacggatgaaccggagcttccggctccttcaggctgttttctgtttccagaatttccacgattcgcattgctgcaacatttgctcttggaagcataatggacatggcagtgatcatcagaaaggccatgatgatctgcatggcatactggataaacgccatcatatctccaacctgcatgtttcctgcatccactgcataggagccattatatacgatcagaactgaaattccgttcatgatcagcatcatggaaggcatcataaaggtcatgcagcggtttacaaacaggtttgtttttgtcagtaccttatttgcatcttcaaatctgtcttcttcatgtttttctctgctgaaggcgcggatcacaggaataccggtcagtatttctcttgtaacaagattcagcctgtcgatcagtgtctgaagctttgtaaatctgggcatagcaatggaaaacagaagtccgatgataacaaggatcagtacaacgcccacacccaggatccaggtcatggaagaatctgtttccagcactcgaagcactcctccgattccaatgatcggagcatacagaacaatacggaacatcattgccatggtcatctgtacctgctgcacgtcattggtgcttctggtgatcagagatgccgtggaaaatttgttgtactcattgctggaaaatccgatcaccttcctgtaaatgtcccctctgatatcatggcccagacttgcagccacctttgccgaaaggaaaactacggaaatggaagctgccatgataagaagcgccatcaggatcattttaagccctgcttttccgatgtatttcatctgaagtccgtccacatcctcgccaagagcctcatactcagcctgaacataggaaaccgctgcctgggttatcatggaatccggcatatcccggaatttttcgcccatgctctctgtcatctgcgctctcgcatcctccggcatctgtgcaatagcctccaccggatctgctccttccggtattcccatctgtgccagcatttccccggatgcttcagtttccatagtcagtccgcccagcatcagcatgggttttccaagtatttcattgagggaagaccgtgtgtctttatcaatatccttcagtacataaagctctccgtcttctgtgtaagcggtttccagctcagaaatatcctcctggctcataaaaagctccagagcgtccatggaggtctttcttattttttgcggaacgccgtcttcaattcctttttgctggatacctatgttgacaatttttgatgtatagtccggaagggacagatcacaatatgcctgcaaaaacaaaagggcaatgatcagcgccacatatccggctgattttttcagatatttcattaatttaatcacttgtcagcctctccttttcctgtagattctctgttttttcctccggaatacacgaaatatttgcaacgatctgttccataaaacgtcggaacaggcatttttcagcatcactgaatcccataaaggcataacgttcattcagctctatctgttctgctaccttcttcttcatttcatatccctgatccgtaagaaaaatccttgtgattctctgatccttttcatcatgtctgcggccgatcagacctgccttttccatacgctgtaccataacattcactgtcggaggctttacacacagttcctccgcgatctccctctggctcatctccacacgttttgccagaagaagcagaatggggatctgtcccgggtgtatgccaagctcagtcatctggctgaagcattttgcagcataagctctgttcagctgcataaacaggtgctgaaaacctgttttttcctgcgtctgcgtatcttccacgatctcacctcgtattcattatatataattagtcggctaattatatataatactcatttgcacaaaaaaggcaagctatttttgtgcactttatacttatttcaccgtttaaacacacttttttcacaaaataatcattagttcaacaaatgtttttctggtttccaaaagaaatacagaacagtaattcagacctacaatgcaaaattcattttttcaataaattaacaacacgaatatttctcaaaaagaaaaaccggagaaagacctcctttatcaggaaatcttctccggctctccatcatataaactggtttgtattttcgtcatactcataatcaatggttctgagtttttctaccagttcctgttttttcagacctctgcaggtacagagtgcttccagggaatcataataatcccgaagctgcgtgttcacataactcagtaaaattaccgggtccttgggtatcatctgtttccgtcctttacattgataataaactggccgtcccttacatccaactccagcgtatctcctgcatgaacatcgccggaaagaatctttttcgcagcaagtgtttccacataattctgaagatagcgcttcagaggacgggctccatacacaggatcatagccgttttccacaacctgcgcttttgccgcctctgtcagagtcagggaaagctcctggtcagacagacgcctgtcaagctctgccaccatcaggtctactatgttaccaatattattttttgtcaagggtttaaacaaaattatttcatccagacgattcaggaactccggtcggaaatgacctctcaaatcattcatgaccatatcctgagcttcctgttttatatctcccttttcatcaataccgtccagaagatagggtgaacctatattggaggtcatgatcagaatggtgttcttgaaatccacagtccttccctgagaatctgtgatacgtccgtcatccaacacctgaagaagtacattaaacacgtccggatgagccttttcaatctcatcaaacagcacaacgctgtacggctttcttctgacagcctctgtcagctgaccgccttcctcatagcccacatatcccggaggcgctccgatcagacgggatacagaatatttctccatatattcactcatgtcaatgcggaccatattctgttcatcatcaaaaagcgttgctgccagtgtttttgccagctccgttttacctacgccggtaggtcccaggaacaggaaagaaccaataggcttggttgggtccttgattccggcctttgaccgcagaatggcatctgtcacaaggcgcacaccctcatcctgaccgatcacccgtttatgaagctcatcttcaaggctcagaagttttgtcctctcgccctcagtcagacgggtaacagggattcctgtccatctggaaatgatctttgcgatctcatcatctgtcacagcctcatgcacaagtcggttgtcactttcctttgtattgcgttcctcgatctcaagctgctgctgaagtcttggaagctctccgtactgaagctctgcagccttttccaggtcatagctctgctttgccttctgtatctgcttattcacatcctcgatctgctcacgaagcttctgaagtttttctacagaatgcttttcattgtcccactgagccttctgagtattaaattcatcccgaagatcagcaagctccttctgaaggtcagcaagacgctccttacttaaattatctgtttcttttttaagggcagactcttcaatctccatctgcatgatcttacgtctctgttcgtcaagctcggtaggcatggaatccagctccgtcttgatcagcgcgcaggcctcatccacaaggtcaatggccttgtccggaagaaagcggtctgtaatatatctgtgcgaaagtgttgctgccgccacaagagcgctgtctgtgatctttactccgtgaaatacctcataacgctccttcagtccacgaagaatggaaatagtatcctccacagtaggctcgtcaaccataaccggctggaaacgacgttccagagcggcgtccttttcaatatactgacgatactcatccagagtggttgctccgatacagtgaagttctcctcttgcaagcatcggcttcagcatatttcccgcatccatggctccgtctgtttttcctgcgcctacgatcaggtgaagctcatcaataaagagaataatatttccctcgctttttttcacttcctccagaaccgccttcagacgttcctcaaactcgcctctgtacttggctcctgctacaagggcgcccatgtccagggcaaaaatctttttgtttttcagtccctcaggaacgtctccggcaacgattcgctgcgccagtccttcaatggcagcggttttacctacgcccggttcaccgatcagaaccggattgttctttgtcttacgggaaagaatcctgacaatatttcggatctccgcatcacggccaattaccggatccagcttctggttgcgggctttttccaccaggtcctctccgtacttattgagagtatcataggttgcttccggattgtcgctgacgactctctgatttccccttactgtagaaagcgcctgaagaaaacgttctctggtaattccaaattcgtcaaaaatctttttcatactgggacttggctgtttcagaagagacagaaacagatgctctacggaaacgtactcatctcccatagctctggcttcgtcttctgcactgacaagggatttattcagatactgtccgaacctgagatctccgccgcttacctttaccctggcatccagggctttttttactgtattaacaaaatattccttattgatctccatcttctcaataagcttgagaatcaggctgtcctcctgactgagaagagcatacagaagatgctcctgctccacttcctgattgccgtattcataggcaatcttttccagatcctgaacagcctgtatggatttctgcgtaaatttactgatattcataggctctcctcctctatctgcaaataaaaatataactggttacttctgatcctttggaccgtaacattgttgtcttgttctagttcttgtataacatatcacattttgttagcaatgtaaagaggtgagtgctaattattttgtgaagaatttgtgaagccttgattttacgggcttcacatggatttttcacttgctttcgcactcgattttcttgatttgaccacatttttacgacaaatcttttggaaaatatattcgtctgattttcttaccacattttacgacaacgacttatggtttataccacagcaggtacgatttctggcaggttcattttagacatctcattctccacgtgagacttctctgcaatatgattgtagacattcattgtgatctgtgcatctgaatgttcttcgctccgctacggtcggtgctaaacggatctccaccggacatccagcaccccatcacatactgcataactttgggattgacattgttctcacccagtctggtacatcccgtatgacgaagggtatgcgatgaaataggcggcatcagctccggctctcgcttctcttcttctgccagtttgctttctttcttattataggtattgacaatatttttcagaaagctgttcactcccgccggcatgattggacgtccatgctttgtattgaagatgaatccactgcgtccaccaatctccacattactctgtaaaccaagcatcaggttcagctctctctgtttacggaacgcatcatataccatctgtgtcataggaatgtctctgattcctgcatccgttttggtttctgaatcatggaaacaatatccttcatcaccttcataatacacaagctgtccacctacatggatctcccgattcttcatatccacatccgaccaagttaagccgatggtttcactcactctcaggcaagccccaaacataacctgcatcattggaagatgaggcttatacacattactctgttcaacaaacttcagaagtttttcctgctgttccagtgtcagtgcttctttctcctttgccggagccccgtaatctccaagtgttcctgttaccggattcttgcggataatcccatcttccactgccagttcaaaactgggattcaataagccataaagacctttgatcgtgctgtgtgccagtccttcatctgacaatgctgaaaagaatgtccttacatgagatgtcttaaaatccaaaacacgaatatttcccaaagtatttcgtatccggtagtcccacatacggatataattctttttcgttctttccttgatattctttgttgccatgtatcgctcaaacaacgtatttacggtcagcttcttgactgatgcgtctgtaataagcagatcatccatatccttattgatcttcttttccatttctcgcagactcgccagatcagctgcataaaccgaattacgttttccggtaatttcatccttgtagcgatactcataacgtccatccggacgctggtattcacctgtttttaaatttctgcctttattatcttttcttgccatatcaatcattcctttcacttcatttttcgttattcggaatgatttttgtcctgtcggtatcagtcatttactgcctgatatctgttcacagattaacataatattttatgatttccaagggtggattcctgcaaaatgctaatttttatttgccttttttacaggaatacttttcacttttcattccgaaggaaagttgttgtattttatcctctcatctttcattacactgccattgcatcaatatatttttttatcttatccacgttatagagaacacgtcttccaacaatcactcttgcctctgcatagtctgcaattttctttgcagttacttctccgcaggataacattgccattaatccttcaatatctaccgtcagacggttctcagccttatactctgttgtttttctcatgatgcacctacctcctttcctccgtattcttctgcatcacctcccagacagcggttatatccgttgtcagtacatttattttttgtttggacttcttacgatgattttccattccgttcggcgtgttggcttccatttgtatatggcggtgtcaacgttacatttgacctctatcagaaatctttctgaatactggcagcttcttctcaaacataccagccgttgccggagtatcttcggtttccacatactactctctgatacagcggtggaatcctgtgttacctttaagccccgaaaggcacccatacagctcattcaattttcaaggttcaacaatcaaaagttttgtaggtatacatttttgtacctatttcgatttaatgccattatatcccccgttactgctaatgtcaatagtacttcgtgcgttttgggttcttttttgtactcttttttgttgattttctgctagtttgtgttataatatggacaaatatttattcatttcttgattttaccatcttcactggatgcttatcaggactaatgcagaggtgactttatgaattttaatctgaaactaaaaaaaatccggacattccggaaaatgacacaaaaagaactgtcagagaagatcggactgaccgatcaacatagaattgtacaatatgaaaaaggcgttcgtgttccaaaaaaagatctggtcgataaaatggcacaggctcttgatgttaatccttataccctctatgataccgctggacgtgacgcttccgaaatgatggaactgcttttctggctggatgaatttaatccatctgccctgcatctgtttcttcctcggaaatttcccggtgaaaaatgcaatgaagtagcagacacttccgtttactatcacgacaatgatagctggccggctcatgctcctgtctgtatgtggtttgattatggggttctgaatgattttctgaaagaatgggtagttcggatggatgaactgaaatccggtgtgattaccagagatgaatattttgagtggaaaatcaactggccgtatacctgtgatgattgtggaaagtttgaacctaagaaacaatggcgctctgtaaaatcagaactcagtgaaacttagcaaaacttaaattcactgcttttttctctttagcaaaagaaaaagcactgtaaaaactgataatccaacggttttcagtgcttttttcatgtttttcctattaaattttcctcagacacctatataagtgaaacttagcgaaacttaaattatgtccaatatggaatatacatatttgtttgttcttgattttttaatctgatcatctatgcaatctatttccatgatgtataaattaattgccttttatcaaatgcttcctctccgccttccataatatctacaatttgcttatgtgtagatttcaggtcaatattcccttgcgatatatcaatcgttgtatcttgatactcaaccacaaaaattctttcagcatcacccagaactggaatgttagcattgtgtgtagcaaaaataaattgtatatcttgtttctttttcgcaattgctgtaattacttcgtcgtaaataattttattatccaaatcatcttctggctgatctataagaataatatcattatcagactgcatgagtataaacaatataagagctgacgcacgctgccctattgaatggtgtcgtaataatttgtcatgataatatatttcaacattattggaaacctgattcttcagaagatccgcatactgatcttgcaattttttatcaagctttgtatattctgaggatgaaataatttccttgattttcataccatcacataatatccagtcttctataagctccacataatctctaaacgtgtcacataagtattgatattttatttcagaaatacctgaccccctaaaatcagtcttcatctgtgatttaaaattatctctgtcacctttaaaatcaatagtgatttttaattcattttgtgattcattaattttctgaatttcaagtttatatgcattgaattgttctaataatatatcatttctttcacgcattgctttcttgaatgcactttctatttgttttttggatttagctcgttcatctagttgctttaaattctctttatatttttccagctcttctgtcattttgacaaatccatcaatatctaacgtatcatctttgatttctctttttatttcagcaaattcatcagataatccatctatttttttcgataacatttccactacatctgcaaattctaacgaattactttctatctgcgtgacggcctctccaatttttaaaatttcatttccaattgcacttaaaatatcacttgccttctttataatatcagaattataaacactttccacgccctgcaggcctaaagtcacatctttattattatcataacacttttttaattctcgtactgctgaatcaattcgtccttttacagaatccaactttgctttatctgttgtgtatccagtttgtttttttaatttttctgcaacgcctttttccttgtaaatagacattttatgctcaacttcagattttttaattttgtattcctcaatctgctctggaattttattcgcatctaataattgagaaaccgatgttgtcaactccttcacacaagatgttatttctgcacttttccctattttcccaccaaccaatttctcaagaagaccattttcatgatcagcactatttgatagatctttttgcccaaaatattgaattccatcaaacaagcttgacggttgtatatttaagtcaagtccattttcatctataacattactctgttctccgtatatacgactaacaatataatgtttgccatgtttatcaacaacagataatgttgcttttcctcctgagccaaaaatattttttatcagtgattctttatattctttatctgtttgcaacggtaaaccaaatatataacgaattgcttcaagcacagacgactttccacttccgcgaattccaattaacgaattaagctctgatgaaaatctaatagtctgaccatcaaattttccgccttgaaaacttatagattcaatatacccatgtcttctttccggtaatgattcagcaactctatttttatagtcctgtaatgcaaatttaatcgccgcatatgaatattctccgatttttaaatatgtttgtttatcgccttttccaatatctttcaatgatttaggatccgatccctctataagagctggaatatatccaaaacaacgattaaatttatttatattatcccttgtcctcgatttttgtattcctaaaactcgttttctaaacggagcaagccctgagagcgattctaaaagaccgcctccacattcgttaaacaaaccactgccttgatcaacatgggcaaatattacaaaataatcttttccatactcctccagtttttccaatgtgctttttaaatcataacaacattttgtatttctattttcaggattagatattgttgcaaatgcggctgttaaaaatgtttgaatgtgattattgccattttctaaccattcatcaggattaaaaactataagagtatgtataccattagctccctctttaacagtcaattctacaccaggtaatataaatattttttctttgcttgctgccctttttaaggctttatattcatctttgtcaaatttattatgattggtaataactccaacagaaatattagcttgtttcaatgccgaaatatatgatttcacaaaatcatttggttcaccactatatgaaaattctttatctttttgtgtatgcagatgaaaatctgcccttaaaaattcaagccctgattcaaacattttatccctccttatattactctacccccaacgccttaaacactgcatcttccgcactctgatacggaatcagctgaaatgcactcatcagatcagccggaacgcttgcaaaatcaacaaatgaggtacttggaatcagcaccttctttgcgccgctatccagacacacctgaagtgtattggcaagttcatccacctttatcattgtgccactaattgttatatctcccaacactgccaagttgctgacaacaggctttccaagggaaatcgaacaaagtgcaatcaatgttggaagtgccagtttatctgtcatgccgataccctgcaaatcctgataattgatgatgtaatccttagttgaggtgctgatagatccactaatccgattgccgttggctttcagataattaaatgccgtgttcaccgcttccttgcatttagaatcactgcctaagccagtccgttcaattttgccattgcctggaagcatctggctttccaaacgaaatacaccaatcatgccgctttttcctctggatacggtataaatttgccccgggttacacattccatccggtatcagcttaccgccaccctgttctggtacggaaacataatgttctgacatatcttctaggtctatataggagaagttcacatcataaaactccatgccacccagcttcttcaattgctccttgacacggcgacgcatttccaatgcaatctgaataatttcttccagttcttctttggtaaactcaccatttgggtacatcaacttcagataaccgtctatcatacgacgaaccgcaattgtgtcacgctgattcagatttctccccaagcggaagtagtgatcaagtgcatctccatactgctccttgcgaagctctcggatgaactctgccaaataatcactgataaaaccgtaatcatcggtaaaatgctccggtctgaacttcggtatctcccatcctggaagataacaatgcatacgatcaagaaatgctgtatctgttcccatttcctgcgggaaaggtgcaaacagactggacgttttcaacagcacgtccacactctgattgatatttcccacaaataccatggacgcagtagcagctttttcttctttgccacgggcaaaagagccggatgccatataatccttcataatctgaatgccatctttatctttaaacttgatacctgccacttcatcaaaggctacacaatcccataagccgaccagtccgactgttttgcgtcccatattgtaaaacaggtttgcaaccgtcgtctgtccaccggaaatcaaaatactgttcggtgaaatttctttgtaaagatgagatttaccggtactcctcggtcctagctcacaaagattaaagttgttttcaactaatggaatcatacgggtcagaagcagccatttctcacgatatgtaaattcatctggctccatgccgatagaacgaagaaggatatccagccattcatctttcgtaaaagctgttcgtccctgcttcagttcatcaatatcaatgtgcggcatctggattggtgtcagcttacggatactgatcggtgaaatatctttctgctttttctgtttggaacgaagcggatttccatcaatgtcttcaatgccaaaattattgtcgccttcaacctcataatccagctgaacaatacaccagataccgccgcagagcaggcgatcaaatttttccggatattcatcggcaatcggtacattaccaacgcccaaattagaaaactctgcaaaaaagcaatcctttttcatatccaatcgaacagtcaccatatcaatgattgtgtgactgccttttttacgcagctgagacagaattttctgtgattcatccgggcgtacaaagttgtcagcaagaatacgcttcacattctgtacgcctttctctataacagtctcatcatctgaactgcaatactgtcccaacaagaactcaagaacatacactgggacattcgccccttctttaattttctttgtcaggtctttccgaacaatcttaccgtcaaagctctgacggagcgtgttctttatttcttcacgggtactttcaccctctgtaaattgctccatctttctctcctcctgcggcattaactaaaaaaatcaaactcgtccaccgcaaaggcgatgtcaatctggaatggctcccgctgtggcatctgtaatccctgttcatctacaattaccagataataagtagctgtattgctgtatttcagagatttcaaattaaactgacaacggaaagttctttctgcaccgttatcgctggtcttatctgcaataatcttctgaacatcgctaatctgcttgccatcctcatctgtaaagtaaacctgataggttgctgcttcacggtttgtactgaccgcatctttttgatagaagttcaatgaaaaaatcatattgctgattttacggtttgcagacagtaaattgaccgttaccggcttagtatcatatttctgcttatttcgcttatattccatagaatcgttgcggagataatgatactcaatcaccggaacaaccatttcctgcaaactgataccaccatgcacaaaattcataccgccaccattcattttgatacgaatactttctctcggtgcaaatccatcaaattctgtatttcctcccaggaattttacagacatcaagtaatctggttgcacacccttctgcataattgcatatcttctgccatactccacacatcgcttgatactttctttttttgtaatgtcagagtttgttacatccatatcaaaaaagcctcttttatctactttgtcctcttccttcaaaggactgtatgtataaagaaatccatgatctgccgtaattagaatattcgttccaccaaattcatttacgataatacgcacaagattcttcaattctgaaatcgccttgtcacacgctgcaaaaacagcagtatccgaagtgtggctggcttcatcaatggtatcgtggtaaatatagaccacatccataccttttaccaaagcacttctttccgctcgcttcatagcaatgatgtcattgtactttaaggccacacttgccgaatcttctgttttcagaaccttatccctataagtacttgccgtagactgtccatctgccaaaactgtcaaaatatcgttccgaacctctactgtcagttctttgtgcggcaataacgctgccataccaaactttgtagtagaagggaagatactctgcatactactgatagaaaccttgctttgcgtttctcgctgaagctgatctgccatcatagccgccacttcataacgcatggcatctgagataattacaaatacttttgtatccgaagtctgaatacgggaacggtaaaaatcttcctgctgcggtacttccagaactttaccgtaagttgccagttcatccgcacatacatccgaccagttgttgcccaactcacctaaaaaccaatgagtatagagtccttccactttatcgacaacatgcttgaacagatcatccagcagaatattggaagtctccaggctcttttgaaaactaagatggaacaaacggtaataagtgtccatctgatagtagctctcagtatattctttccagatacttttcgcttctgcggtatggaatccggctgaatgttccttaaagaaactttgcatattcgccacttgtaagataccgtcataaaaattctcaaatggctcataccatacacaagttctccgtttttcaacggtattcgtaatggtatccacatcaatgatatggtcactgatctctgtcattagctttgtcagaatcacttcattaatacacgggaagcattctgttcctaccaaatcctctaccgtcagcttttcaaagcgctgatgcagacgggcttcatcctcaacataacgtgccacatcatataattgctgaatgttgtcactatgaagccattcagcaataaaatcatagcaatatgcctgatgtggcatggaaataaaaccgtccagtccagcaagatattcctgccgcatggtacgggtcgctgcagttaaaagcagatgaattgccaaccgcccaaggtctggttcttcctccacaaatccacatccctgacgaaccatcgcccaaaatgctgcgtctgcatgatattttacaaaatcctgataaaccgtattattattcaaatcaagtcccgcctgaaacacactacggagaatcatattgggctgtgcatctttcaatccacagattgccgccatgatagccatgtgtaactgtgccggtgtttccggaactttattctgtgtgctgactttcaaacgacggtttttcgcattgaaataagcacgataattttttacctgtttcctcattgccggatttgatataagttccatctcatccatccagatagaaatcaagtctgcccgaaactcctcactgtaaagctccacatccagaagccagttatcatccgggcgattatagacacacggactgtaaatcagataatttgtggtcaaatcatctactgaaagcagtttttttactgaaaatgcattatttccagtcagcgcaatcacctttgcattttccaaaaccacttcatccagtttatcctcaaattccttatcttcatcgtaccagaaaatgatacgacgctgataaaactcaggcagaggtgcagcaaatctgcgatttaaatcttgtattattttatctgtatccatgctgtcctcctaccttataattttccaatttgattttcgttttgttccgctctgtaccaatctacctttttcctgtaaagaagcaaacattcgagaaaccgttctttttgacacacctatttcttccgcataatacgcctgtgttgcagatggatttttctctataatctgcaacaacttttcaagctgcgtctgttccttattaaacggcacttcatcaccattagtgccatcattgacgccacaatcaccgccaatagtgccattttcaacgccactggcgttaatcatggcgttattggtatcaatctgacctcgataaatattgatacgcaaatcaacttcgccaccaataaactccggctcctgcagtccggcagcttttactttatcaataattctcggaataccacttccccaatgctcgatcagattcatgtaagcaaacgcatgagcaagagcttcatttctgattttagaataaccttctttcatacgttccatcgtttgtcccattggcagctttcctggggaagtaatctctaatcggttgtcatatacagcaacctgtatggtaccatgatccagataactacgatgtaccatagcattaataatcaactcacgaatggcatccggtggaatctcataaacgtcctggcgataaattcccacaatagtagcacccaaatgaatatttctcagaacaaactgaaatgcttcgtctatctgctcccaaagcggaccggtatattctctacggtcaacaaatactgctttcgttgtacctttgaacacaccacattgcgttgcaacatgaagtcctccgttaccagtcaaaatagcaaaagcattagacggataatcttttccatcacgctcaatcaaaatgccccaggagcgcaactgctgtctgcctacatctttaatcgctgctttctgttcctctgt
